(19) United States
(12) Patent Application Publication
(10) Pub. No.: US 2012/0244162 A1
(43) Pub. Date: Sep. 27, 2012

(54) CROSS-SPECIES-SPECIFIC BISPECIFIC BINDERS

(75) Inventors: Peter KUFER, Moosburg (DE); Tobias Raum, Munchen (DE); Roman Kischel, Karlsfeld (DE); Ralf Lutterbüse, Neuried (DE); Patrick Hoffmann, Bad Heilbrunn (DE); Matthias Klinger, Gilching (DE); Doris Rau, Unterhaching (DE); Susanne Mangold, Cham (CH)

(73) Assignee: Micromet AG

(21) Appl. No.: 13/408,363

(22) Filed: Feb. 29, 2012

Related U.S. Application Data
(63) Continuation of application No. 12/594,729, filed on Oct. 7, 2009, now abandoned.
(60) Provisional application No. 60/913,668, filed on Apr. 24, 2007.

(30) Foreign Application Priority Data
Apr. 3, 2007 (EP) 07006988.5
Apr. 3, 2007 (EP) 07006990.1
Oct. 22, 2007 (EP) 07020640.4
Oct. 22, 2007 (EP) 07020641.2
Oct. 22, 2007 (EP) 07020646.1
Mar. 13, 2008 (EP) 08004741.8

(51) Int. Cl. C07K 16/46; A61K 39/395; A61P 35/00; C12N 1/19; C12N 15/63; C12P 21/00; C12N 1/21; C12N 5/10; C12N 15/13; A61P 37/00

(52) U.S. Cl. 424/136.1; 530/387.3; 536/23.53; 435/320.1; 435/69.6; 435/252.33; 435/252.3; 435/252.31; 435/419; 435/254.2; 435/328

(57) ABSTRACT

The present invention relates to a polypeptide comprising a first human binding domain capbable of binding to an epitope of human and non-chimpanzee CD3ε (epsilon) chain and a second binding domain capable of binding to EGFR, Her2/neu or IgE of a human and/or a non-chimpanzee primate as well as to a process for the production of the mentioned polypeptide. The invention further relates to nucleic acid sequences encoding the polypeptide, to vectors comprising the nucleic acid sequences and to host cells comprising the nucleic acid sequences or vectors containing the nucleic acid sequences. In another aspect, the invention provides for a pharmaceutical composition comprising the polypeptide and methods of medical treatment or use of the polypeptide.

[0001] The present invention relates to a polypeptide comprising a first human binding domain capable of binding to an epitope of human and non-chimpanzee primate CD3 (epsilon) and a second binding domain capable of binding to EGFR, Her2/neu or IgE of a human and/or a non-chimpanzee primate as well as to a process for the production of the mentioned polypeptide. The invention further relates to nucleic acids encoding for the polypeptide, to vectors comprising the same and to host cells comprising the vector. In another aspect, the invention provides for a pharmaceutical composition comprising the mentioned polypeptide and medical uses of the polypeptide.

[0002] T cell recognition is mediated by clonotypically distributed alpha beta and gamma delta T cell receptors (TcR) that interact with the peptide-loaded molecules of the peptide MHC (pMHC) (Davis & Bjorkman, Nature 334 (1988), 395-402). The antigen-specific chains of the TcR do not possess signalling domains but instead are coupled to the conserved multisubunit signaling apparatus CD3 (Call, Cell 111 (2002), 967-979, Alarcon, Immunol. Rev. 191 (2003), 38-46, Malissen Immunol. Rev. 191 (2003), 7-27). The mechanism by which TcR ligation is directly communicated to the signalling apparatus remains a fundamental question in T cell biology (Alarcon, loc. cit.; Davis, Cell 110 (2002), 285-287). It seems clear that sustained T cell responses involve coreceptor engagement, TcR oligomerization, and a higher order arrangement of TcR-pMHC complexes in the immunological synapse (Davis & van der Merwe, Curr. Biol. 11 (2001), R289-R291, Davis, Nat. Immunol. 4 (2003), 217-224). However very early TcR signalling occurs in the absence of these events and may involve a ligand-induced conformational change in CD3 epsilon (Alarcon, loc. cit., Davis (2002), loc. cit., Gil, J. Biol. Chem. 276 (2001), 11174-11179, Gil, Cell 109 (2002), 901-912). The epsilon, gamma, delta and zeta subunits of the signaling complex associate with each other to form a CD3 epsilon-gamma heterodimer, a CD3 epsilon-delta. heterodimer, and a CD3 zeta-zeta homodimer (Call, loc. cit.). Various studies have revealed that the CD3 molecules are important for the proper cell surface expression of the alpha beta TcR and normal T cell development (Berkhout, J. Biol. Chem. 263 (1988), 8528-8536, Wang, J. Exp. Med. 188 (1998), 1375-1380, Kappes, Curr. Opin. Immunol. 7 (1995), 441-447). The solution structure of the ectodomain fragments of the mouse CD3 epsilon gamma heterodimer showed that the epsilon gamma subunits are both C2-set Ig domains that interact with each other to form an unusual side-to-side dimer configuration (Sun, Cell 105 (2001), 913-923). Although the cysteine-rich stalk appears to play an important role in driving CD3 dimerization (Su, loc. cit., Borroto, J. Biol. Chem. 273 (1998), 12807-12816), interaction by means of the extracellular domains of CD3 epsilon and CD3 gamma is sufficient for assembly of these proteins with TcR beta (Manolios, Eur. J. Immunol. 24 (1994), 84-92, Manolios & Li, Immunol. Cell Biol. 73 (1995), 532-536). Although still controversial, the dominant stoichiometry of the TcR most likely comprises one alpha beta TcR, one CD3 epsilon gamma heterodimer, one CD3 epsilon delta heterodimer and one CD3 zeta zeta homodimer (Call, loc. cit.). Given the central role of the human CD3 epsilon gamma heterodimer in the immune response, the crystal structure of this complex bound to the therapeutic antibody OKT3 has recently been elucidated (Kjer-Nielsen, PNAS 101, (2004), 7675-7680).

[0003] A number of therapeutic strategies modulate T cell immunity by targeting TcR signaling, particularly the anti-human CD3 monoclonal antibodies (mAbs) that are widely used clinically in immunosuppressive regimes. The CD3-specific mouse mAb OKT3 was the first mAb licensed for use in humans (Sgro, Toxicology 105 (1995), 23-29) and is widely used clinically as an immunosuppressive agent in transplantation (Chatenoud, Clin. Transplant 7 (1993), 422-430, Chatenoud, Nat. Rev. Immunol. 3 (2003), 123-132, Kumar, Transplant. Proc. 30 (1998), 1351-1352), type 1 diabetes (Chatenoud (2003), loc. cit.), and psoriasis (Utset, J. Rheumatol. 29 (2002), 1907-1913). Moreover, anti-CD3 mAbs can induce partial T cell signalling and clonal anergy (Smith, J. Exp. Med. 185 (1997), 1413-1422). OKT3 has been described in the literature as a potent T cell mitogen (Van Wauve, J. Immunol. 124 (1980), 2708-18) as well as a potent T cell killer (Wong, Transplantation 50 (1990), 683-9). OKT3 exhibits both of these activities in a time-dependent fashion; following early activation of T cells leading to cytokine release, upon further administration OKT3 later blocks all known T cell functions. It is due to this later blocking of T cell function that OKT3 has found such wide application as an immunosuppressant in therapy regimens for reduction or even abolition of allograft tissue rejection.

[0004] OKT3 reverses allograft tissue rejection most probably by blocking the function of all T cells, which play a major role in acute rejection. OKT3 reacts with and blocks the function of the CD3 complex in the membrane of human T cells, which is associated with the antigen recognition structure of T cells (TCR) and is essential for signal transduction. Which subunit of the TCR/CD3 is bound by OKT3 has been the subject of multiple studies. Though some evidence has pointed to a specificity of OKT3 for the epsilon-subunit of the TCR/CD3 complex (Tunnacliffe, Int. Immunol. 1 (1989), 546-50; Kjer-Nielsen, PNAS 101, (2004), 7675-7680). Further evidence has shown that OKT3 binding of the TCR/CD3 complex requires other subunits of this complex to be present (Salmeron, J. Immunol. 147 (1991), 3047-52).

[0005] Other well known antibodies specific for the CD3 molecule are listed in Tunnacliffe, Int. Immunol. 1 (1989), 546-50. As indicated above, such CD3 specific antibodies are able to induce various T cell responses such as lymphokine production (Von Wussow, J. Immunol. 127 (1981), 1197; Palacious, J. Immunol. 128 (1982), 337), proliferation (Van Wauve, J. Immunol. 124 (1980), 2708-18) and suppressor-T cell induction (Kunicka, in “Lymphocyte Typing II” 1 (1986), 223). That is, depending on the experimental conditions, CD3 specific monoclonal antibody can either inhibit or induce cytotoxicity (Leewenberg, J. Immunol. 134 (1985), 3770; Phillips, J. Immunol. 136 (1986) 1579; Platsoucas, Proc. Natl. Acad. Sci. USA 78 (1981), 4500; Itoh, Cell. Immunol. 108 (1987), 283-96; Mentzer, J. Immunol. 135 (1985), 34; Landegren, J. Exp. Med. 155 (1982), 1579; Choi (2001), Eur. J. Immunol. 31, 94-106; Xu (2000), Cell Immunol. 200, 16-26; Kimball (1995), Transpl. Immunol. 3, 212-221).

[0006] Although many of the CD3 antibodies described in the art have been reported to recognize the CD3 epsilon subunit of the CD3 complex, most of them bind in fact to conformational epitopes and, thus, only recognize CD3 epsilon in the native context of the TCR. Conformational epitopes are characterized by the presence of two or more discrete amino acid residues which are separated in the primary sequence, but come together on the surface of the molecule when the polypeptide folds into the native protein/antigen (Sela, (1969) Science 166, 1365 and Layer, (1990) Cell 61, 553-6). The conformational epitopes bound by CD3 epsilon antibodies described in the art may be separated in two groups. In the major group, said epitopes are being formed by two CD3 subunits, e.g. of the CD3 epsilon chain and the CD3 gamma or CD3 delta chain. For example, it has been found in several studies that the most widely used CD3 epsilon monoclonal antibodies OKT3, WT31, UCHT1, 7D6 and Leu-4 did not bind to cells singly transfected with the CD3-epsilon chain. However, these antibodies stained cells doubly transfected with a combination of CD3 epsilon plus either CD3 gamma or CD3 delta (Tunnacliffe, loc. cit.; Law, Int. Immunol. 14 (2002), 389-400; Salmeron, J. Immunol. 147 (1991), 3047-52; Coulie, Eur. J. Immunol. 21 (1991), 1703-9). In a second smaller group, the conformational epitope is being formed within the CD3 epsilon subunit itself. A member of this group is for instance mAb APA 1/1 which has been raised against denatured CD3 epsilon (Risueno, Blood 106 (2005), 601-8). Taken together, most of the CD3 epsilon antibodies described in the art recognize conformational epitopes located on two or more subunits of CD3. The discrete amino acid residues forming the three-dimensional structure of these epitopes may hereby be located either on the CD3 epsilon subunit itself or on the CD3 epsilon subunit and other CD3 subunits such as CD3 gamma or CD3 delta.

[0007] Another problem with respect to CD3 antibodies is that many CD3 antibodies have been found to be species-specific. Anti-CD3 monoclonal antibodies—as holds generally true for any other monoclonal antibodies—function by way of highly specific recognition of their target molecules. They recognize only a single site, or epitope, on their target CD3 molecule. For example, one of the most widely used and best characterized monoclonal antibodies specific for the CD3 complex is OKT-3. This antibody reacts with chimpanzee CD3 but not with the CD3 homolog of other primates, such as macaques, or with dog CD3 (Sandusky et al., J. Med. Primatol. 15 (1986), 441-451). The anti-CD3 monoclonal antibody UCHT-1 is also reactive with CD3 from chimpanzee but not with CD3 from macaques (own data). On the other hand, there are also examples of monoclonal antibodies, which recognize macaque antigens, but not their human counterparts. One example of this group is monoclonal antibody FN-18 directed to CD3 from macaques (Uda et al., J. Med. Primatol. 30 (2001), 141-147). Interestingly, it has been found that peripheral lymphocytes from about 12% of cynomolgus monkeys lacked reactivity with anti-rhesus monkey CD3 monoclonal antibody (FN-18) due to a polymorphism of the CD3 antigen in macaques. Uda et al. described a substitution of two amino acids in the CD3 sequence of cynomolgus monkeys, which are not reactive with FN-18 antibodies, as compared to CD3 derived from animals, which are reactive with FN-18 antibodies (Uda et al., J Med Primatol. 32 (2003), 105-10; Uda et al., J Med Primatol. 33 (2004), 34-7).

[0008] While this discriminatory ability, i.e. the species specificity, inherent to CD3 monoclonal antibodies and fragments thereof is a significant impediment to their development as therapeutic agents for the treatment of human diseases. In order to obtain market approval any new candidate medication must pass through rigorous testing. This testing can be subdivided into preclinical and clinical phases: Whereas the latter—further subdivided into the generally known clinical phases I, II and III—is performed in human patients, the former is performed in animals. The aim of pre-clinical testing is to prove that the drug candidate has the desired activity and most importantly is safe. Only when the safety in animals and possible effectiveness of the drug candidate has been established in preclinical testing this drug candidate will be approved for clinical testing in humans by the respective regulatory authority. Drug candidates can be tested for safety in animals in the following three ways, (i) in a relevant species, i.e. a species where the drug candidates can recognize the ortholog antigens, (ii) in a transgenic animal containing the human antigens and (iii) by use of a surrogate for the drug candidate that can bind the ortholog antigens present in the animal. Limitations of transgenic animals are that this technology is typically limited to rodents. Between rodents and man there are significant differences in the physiology and the safety results cannot be easily extrapolated to humans. The limitations of a surrogate for the drug candidate are the different composition of matter compared to the actual drug candidate and often the animals used are rodents with the limitation as discussed above. Therefore, preclinical data generated in rodents are of limited predictive power with respect to the drug candidate. The approach of choice for safety testing is the use of a relevant species, preferably a lower primate. The limitation now of the CD3 binding molecules suitable for therapeutic intervention in man described in the art is that the relevant species are higher primates, in particular chimpanzees. Chimpanzees are considered as endangered species and due to their human-like nature, the use of such animals for drug safety testing has been banned in Europe and is highly restricted elsewhere.

[0009] The present invention relates to a polypeptide comprising a, preferably human, first binding domain capable of binding to an epitope of human and non-chimpanzee primate CD3ε (epsilon) chain and a second binding domain capable of binding to EGFR, Her2/neu or IgE of a human and/or a non-chimpanzee primate, wherein the epitope is part of an amino acid sequence comprised in the group consisting of SEQ ID NOs. 2, 4, 6, or 8. Sequences as shown in SEQ ID NOs. 2, 4, 6 and 8 and fragments thereof are context independent CD3 epitopes.

[0010] The advantage of the present invention is the provision of a polypeptide comprising a, preferably human, binding domain exhibiting cross-species specificity to human and non-chimpanzee primate CD3ε (epsilon) chain, which can be used both for preclinical evaluation of safety, activity and/or pharmacokinetic profile of these, preferably human, binding domains in primates and—in the identical form—as drugs in humans. The same molecule can be used in preclinical animal studies as well as in clinical studies in humans. This leads to highly comparable results and a much-increased predictive power of the animal studies compared to species-specific surrogate molecules. In the present invention, an N-terminal 1-27 amino acid residue polypeptide fragment of the extracellular domain of CD3 epsilon was surprisingly identified which—in contrast to all other known epitopes of CD3 epsilon described in the art—maintains its three-dimensional structural integrity when taken out of its native environment in the CD3 complex (and fused to a heterologous amino acid sequence such as EpCAM or an immunoglobulin Fc part).

[0011] The context-independence of the CD3 epitope provided in this invention corresponds to the first 27 N-terminal amino acids of CD3 epsilon or functional fragments of this 27 amino acid stretch. The phrase “context-independent,” as used herein in relation to the CD3 epitope means that binding of the herein described inventive binding molecules/antibody molecules does not lead to a change or modification of the conformation, sequence, or structure surrounding the antigenic determinant or epitope. In contrast, the CD3 epitope recognized by a conventional CD3 binding molecule (e.g. as disclosed in WO 99/54440 or WO 04/106380) is localized on the CD3 epsilon chain C-terminal to the N-terminal 1-27 amino acids of the context-independent epitope, where it only takes the correct conformation if it is embedded within the rest of the epsilon chain and held in the right position by heterodimerization of the epsilon chain with either the CD3 gamma or delta chain.

[0012] Anti-CD3 binding molecules as part of a bispecific binding molecule as provided herein and generated (and directed) against a context-independent CD3 epitope provide for a surprising clinical improvement with regard to T cell redistribution and, thus, a more favourable safety profile. Without being bound by theory, since the CD3 epitope is context-independent, forming an autonomous selfsufficient subdomain without much influence on the rest of the CD3 complex, the CD3 binding molecules provided herein induce less allosteric changes in CD3 conformation than the conventional CD3 binding molecules (like molecules provided in WO 99/54440), which recognize context-dependent CD3 epitopes.

[0013] The context independence of the CD3 epitope of CD3 binding molecules of the invention as part of a bispecific binbing molecule is associated with less T cell redistribution during the starting phase of treatment with CD3 binding molecules of the invention resulting in a better safety profile of CD3 binding molecules of the invention compared to conventional CD3 binding molecules known in the art, which recognize context dependent CD3 epitopes. Particularly, because T cell redistribution during the starting phase of treatment with CD3 binding molecules is a major risk factor for CNS adverse events, the CD3 binding molecules of the invention by recognizing a context independent rather than a context dependent CD3 epitope have a substantial safety advantage over the CD3 binding molecules known in the art. Patients with such CNS adverse events related to T cell redistribution during the starting phase of treatment with conventional CD3 binding molecules usually suffer from confusion and disorientation, in some cases also from urinary incontinence. Confusion is a change in mental status in which the patient is not able to think with his or her usual level of clarity. The patient usually has difficulties to concentrate and thinking is not only blurred and unclear but often significantly slowed down. Patients with CNS adverse events related to T cell redistribution during the starting phase of treatment with conventional CD3 binding molecules may also suffer from loss of memory. Frequently, the confusion leads to the loss of ability to recognize people and/or places, or tell time and the date. Feelings of disorientation are common in confusion, and the decision-making ability is impaired. CNS adverse events related to T cell redistribution during the starting phase of treatment with conventional CD3 binding molecules may further comprise blurred speech and/or word finding difficulties. This disorder may impair both, the expression and understanding of language as well as reading and writing. Besides urinary incontinence, also vertigo and dizziness may accompany CNS adverse events related to T cell redistribution during the starting phase of treatment with conventional CD3 binding molecules in some patients.

[0014] The maintenance of the three-dimensional structure within the mentioned 27 amino acid N-terminal polypeptide fragment of CD3 epsilon can be used for the generation of, preferably human, binding domains which bind to the N-terminal CD3 epsilon polypeptide fragment in vitro and to the native (CD3 epsilon subunit of the) CD3 complex on T cells in vivo with the same binding affinity. These data strongly indicate that the N-terminal fragment as described herein forms a tertiary conformation, which is similar to its structure normally existing in vivo. A very sensitive test for the importance of the structural integrity of the amino acid 1-27 of the N-terminal polypeptide fragment of CD3 epsilon was performed. Individual amino acids of amino acids 1-27 of the N-terminal polypeptide fragment of CD3 epsilon were changed to alanine (alanine scanning) to test the sensitivity of the amino acids 1-27 of the N-terminal polypeptide fragment of CD3 epsilon for minor disruptions. CD3 specific antibody molecules as part of a bispecific binbing molecule of the invention were used to test for binding to the alanine-mutants of amino acids 1-27 of the N-terminal polypeptide fragment of CD3 epsilon (see appended Example 5). Individual exchanges of the first five amino acid residues at the very N-terminal end of the fragment and two of the amino acids at positions 23 and 25 of the amino acids 1-27 of the N-terminal polypeptide fragment of CD3 epsilon were critical for binding of the antibody molecules. The substitution of amino acid residues in the region of position 1-5 comprising the residues Q (Glutamine at position 1), D (Aspartic acid at position 2), G (Glycine at position 3), N (Asparagine at position 4), and E (Glutamic acid at position 5) to Alanine abolished binding of the, preferably human, binding molecules of the invention to said fragment. While, for at least some of the, preferably human, binding molecules of the invention, two amino acid residues at the C-terminus of the mentioned fragment T (Threonine at position 23) and I (Isoleucine at position 25) reduced the binding energy to the, preferably human, binding molecules of the invention.

[0015] Unexpectedly, it has been found that the thus isolated, preferably human, binding molecules not only recognize the human N-terminal fragment of CD3 epsilon, but also the corresponding homologous fragments of CD3 epsilon of various primates, including New-World Monkeys (Marmoset, Callithrix jacchus; Saguinus oedipus; Saimiri sciureus) and Old-World Monkeys (Macaca fascicularis, also known as Cynomolgus Monkey; or Macaca mulatta, also known as Rhesus Monkey). Thus, multi-primate specificity of the CD3-binding molecules of the invention was detected. The following sequence analyses confirmed that human and primates share a highly homologous sequence stretch at the N-terminus of the extracellular domain of CD3 epsilon.

[0016] It has been found in the present invention that it is possible to generate, preferably human, binding molecules specific for CD3 epsilon wherein the identical molecule can be used in preclinical animal testing, as well as clinical studies and even in therapy in human. This is due to the unexpected identification of, preferably human, binding molecules, which, in addition to binding to human CD3 epsilon (and due to genetic similarity likely to the chimpanzee counterpart), also bind to the homologs of said antigens of non-chimpanzee primates, including New-World Monkeys and Old-World Monkeys. As shown in the following Examples, said CD3 epsilon specific, preferably human, binding molecules can be integrated into bispecific single chain antibodies in order to generate therapeutics against various diseases, including but not limited to cancer or immunological disorders. Thus, the need to construct a surrogate CD3 epsilon binding domain or a bispecific single chain antibody including the same for testing in a phylogenetic distant (from humans) species disappears. As a result, the very same molecule can be used in animal preclinical testing as is intended to be administered to humans in clinical testing as well as following market approval and therapeutic drug administration. The ability to use the same molecule for preclinical animal testing as in later administration to humans virtually eliminates, or at least greatly reduces, the danger that the data obtained in preclinical animal testing have limited applicability to the human case. In short, obtaining preclinical safety data in animals using the same molecule as will actually be administered to humans does much to ensure the applicability of the data to a human-relevant scenario. In contrast, in conventional approaches using surrogate molecules, said surrogate molecules have to be molecularly adapted to the animal test system used for preclinical safety assessment. Thus, the molecule to be used in human therapy in fact differs in sequence and also likely in structure from the surrogate molecule used, in preclinical testing in pharmacokinetic parameters and/or biological activity, with the consequence that data obtained in preclinical animal testing have limited applicability/transferability to the human case. The use of surrogate molecules requires the construction, production, purification and characterization of a completely new construct. This leads to additional development costs and time necessary to obtain that molecule. In sum, surrogates have to be developed separately in addition to the actual drug to be used in human therapy, so that two lines of development for two molecules have to be carried out. Therefore, a major advantage of the human binding molecule or a antibody-based constructs exhibiting cross-species specificity described herein is that the identical molecule can be used for therapeutics in humans and in preclinical animal testing.

[0017] It is preferred for polypeptide of the invention that the first binding domain capable of binding to an epitope of the human and non-chimpanzee primate CD3 epsilon chain is of human origin.

[0018] In addition, due to the human origin of the human binding molecules of the invention the generation of an immune reaction against said binding molecules is excluded to the maximum possible extent upon administration of the binding molecules to human patients.

[0019] Another major advantage of the, preferably human, CD3 epsilon specific human binding molecules as part of a bispecific binbing molecule of the invention is their applicability for preclinical testing in various primates. The behavior of a drug candidate in animals should ideally be indicative of the expected behavior of this drug candidate upon administration to humans. As a result, the data obtained from such preclinical testing should therefore generally have a high predictive power for the human case. However, as learned from the tragic outcome of the recent Phase I clinical trial on TGN1412 (a CD28 monoclonal antibody), a drug candidate may act differently in a primate species than in humans: Whereas in preclinical testing of said antibody no or only limited adverse effects have been observed in animal studies performed with cynomolgus monkeys, six human patients developed multiple organ failure upon administration of said antibody (Lancet 368 (2006), 2206-7). The results of these not-desired negative events suggest that it may not be sufficient to limit preclinical testing to only one (primate) species. The fact that the CD3 epsilon specific human binding molecules of the invention bind to a series of New-World and Old-World Monkeys may help to overcome the problems faced in the case mentioned above. Accordingly, the present invention provides means and methods for minimizing species differences in effects when drugs for human therapy are being developed and tested.

[0020] With the, preferably human, cross-species specific CD3 epsilon binding domain as part of a bispecific binbing molecule of the invention it is also no longer necessary to adapt the test animal to the drug candidate intended for administration to humans, such as e.g. the creation of transgenic animals. The CD3 epsilon specific, preferably human, binding molecules (or bispecific single chain antibodies containing the same), exhibiting cross-species specificity according to the uses and the methods of invention can be directly used for preclinical testing in non-chimpanzee primates, without any genetic manipulation of the animals. As well known to those skilled in the art, approaches in which the test animal is adapted to the drug candidate always bear the risk that the results obtained in the preclinical safety testing are less representative and predictive for humans due to the modification of the animal. For example, in transgenic animals, the proteins encoded by the transgenes are often highly over-expressed. Thus, data obtained for the biological activity of an antibody against this protein antigen may be limited in their predictive value for humans in which the protein is expressed at much lower, more physiological levels.

[0021] A further advantage of the uses of the CD3 epsilon specific, preferably human, binding molecules (or bispecific single chain antibodies containing the same) exhibiting cross-species specificity is the fact that chimpanzees as an endangered species are avoided for animal testing. Chimpanzees are the closest relatives to humans and were recently grouped into the family of hominids based on the genome sequencing data (Wildman et al., PNAS 100 (2003), 7181). Therefore, data obtained with chimpanzee is generally considered to be highly predictive for humans. However, due to their status as endangered species, the number of chimpanzees, which can be used for medical experiments, is highly restricted. As stated above, maintenance of chimpanzees for animal testing is therefore both costly and ethically problematic. The uses of CD3 epsilon specific, preferably human, binding molecules of the invention (or bispecific single chain antibodies containing the same) avoids both ethical objections and financial burden during preclinical testing without prejudicing the quality, i.e. applicability, of the animal testing data obtained. In light of this, the uses of CD3 epsilon specific, preferably human, binding molecules (or bispecific single chain antibodies containing the same) provides for a reasonable alternative for studies in chimpanzees.

[0022] A further advantage of the CD3 epsilon specific, preferably human, binding molecules of the invention (or bispecific single chain antibodies containing the same) is the ability of extracting multiple blood samples when using it as part of animal preclinical testing, for example in the course of pharmacokinetic animal studies. Multiple blood extractions can be much more readily obtained with a non-chimpanzee primate than with lower animals, e.g. a mouse. The extraction of multiple blood samples allows continuous testing of blood parameters for the determination of the biological effects induced by the, preferably human, binding molecule (or bispecific single chain antibody) of the invention. Furthermore, the extraction of multiple blood samples enables the researcher to evaluate the pharmacokinetic profile of the, preferably human, binding molecule (or bispecific single chain antibody) as defined herein. In addition, potential side effects, which may be induced by said, preferably human, binding molecule (or bispecific single chain antibody) reflected in blood parameters can be measured in different blood samples extracted during the course of the administration of said antibody. This allows the determination of the potential toxicity profile of the, preferably human, binding molecule (or bispecific single chain antibody) as defined herein.

[0023] The advantages of the, preferably human, binding molecules (or bispecific single chain antibodies) as defined herein exhibiting cross-species specificity may be briefly summarized as follows:

[0024] First, the, preferably human, binding molecules (or bispecific single chain antibodies) as defined herein used in preclinical testing is the same as the one used in human therapy. Thus, it is no longer necessary to develop two independent molecules, which may differ in their pharmacokinetic properties and biological activity. This is highly advantageous in that e.g. the pharmacokinetic results are more directly transferable and applicable to the human setting than e.g. in conventional surrogate approaches.

[0025] Second, the uses of the, preferably human, binding molecules (or bispecific single chain antibodies) as defined herein for the preparation of therapeutics in human is less cost- and labor-intensive than surrogate approaches.

[0026] Third, the, preferably human, binding molecules (or bispecific single chain antibodies) as defined herein can be used for preclinical testing not only in one primate species, but in a series of different primate species, thereby limiting the risk of potential species differences between primates and human.

[0027] Fourth, chimpanzee as an endangered species for animal testing is avoided.

[0028] Fifth, multiple blood samples can be extracted for extensive pharmacokinetic studies.

[0029] Sixth, due to the human origin of the, preferably human, binding molecules according to a preferred embodiment of the invention the generation of an immune reaction against said binding molecules is minimalized when administered to human patients. Induction of an immune response with antibodies specific for a drug candidate derived from a non-human species as e.g. a mouse leading to the development of human-anti-human antibodies (HAMAs) against therapeutic molecules of murine origin is excluded.

[0030] The term “protein” is well known in the art and describes biological compounds. Proteins comprise one or more amino acid chains (polypeptides), whereby the amino acids are bound among one another via a peptide bond. The term “polypeptide” as used herein describes a group of molecules, which consist of more than 30 amino acids. In accordance with the invention, the group of polypeptides comprises “proteins” as long as the proteins consist of a single polypeptide. Also in line with the definition the term “polypeptide” describes fragments of proteins as long as these fragments consist of more than 30 amino acids. Polypeptides may further form multimers such as dimers, trimers and higher oligomers, i.e. consisting of more than one polypeptide molecule. Polypeptide molecules forming such dimers, trimers etc. may be identical or non-identical. The corresponding higher order structures of such multimers are, consequently, termed homo- or heterodimers, homo- or heterotrimers etc. An example for a hereteromultimer is an antibody molecule, which, in its naturally occurring form, consists of two identical light polypeptide chains and two identical heavy polypeptide chains. The terms “polypeptide” and “protein” also refer to naturally modified polypeptides/proteins wherein the modification is effected e.g. by post-translational modifications like glycosylation, acetylation, phosphorylation and the like. Such modifications are well known in the art.

[0031] As used herein, “human” and “man” refers to the species Homo sapiens. As far as the medical uses of the constructs described herein are concerned, human patients are to be treated with the same molecule.

[0032] The term “human origin” as used in the context with the molecules of the invention describes molecules derivable from human libraries or having a structure/sequence corresponding to the human equivalent. Accordingly, proteins having an amino acid sequence corresponding to the analog human sequence, e.g. an antibody fragment having an amino acid sequences in the framework corresponding to the human germ line sequences, are understood as molecules of human origin.

[0033] As used herein, a “non-chimpanzee primate” or “non-chimp primate” or grammatical variants thereof refers to any primate other than chimpanzee, i.e. other than an animal of belonging to the genus Pan, and including the species Pan paniscus and Pan troglodytes, also known as Anthropopithecus troglodytes or Simia satyrus. A “primate”, “primate species”, “primates” or grammatical variants thereof denote/s an order of eutherian mammals divided into the two suborders of prosimians and anthropoids and comprising man, apes, monkeys and lemurs. Specifically, “primates” as used herein comprises the suborder Strepsirrhini (non-tarsier prosimians), including the infraorder Lemuriformes (itself including the superfamilies Chemogaleoidea and Lemuroidea), the infraorder Chiromyiformes (itself including the family Daubentoniidae) and the infraorder Lorisiformes (itself including the families Lorisidae and Galagidae). “Primates” as used herein also comprises the suborder Haplorrhini, including the infraorder Tarsiiformes (itself including the family Tarsiidae), the infraorder Simiiformes (itself including the Platyrrhini, or New-World monkeys, and the Catarrhini, including the Cercopithecidea, or Old-World Monkeys).

[0034] The non-chimpanzee primate species may be understood within the meaning of the invention to be a lemur, a tarsier, a gibbon, a marmoset (belonging to New-World Monkeys of the family Cebidae) or an Old-World Monkey (belonging to the superfamily Cercopithecoidea).

[0035] As used herein, an “Old-World Monkey” comprises any monkey falling in the superfamily Cercopithecoidea, itself subdivided into the families: the Cercopithecinae, which are mainly African but include the diverse genus of macaques which are Asian and North African; and the Colobinae, which include most of the Asian genera but also the African colobus monkeys.

[0036] Specifically, within the subfamily Cercopithecinae, an advantageous non-chimpanzee primate may be from the Tribe Cercopithecini, within the genus Allenopithecus (Allen's Swamp Monkey, Allenopithecus nigroviridis); within the genus Miopithecus (Angolan Talapoin, Miopithecus talapoin; Gabon Talapoin, Miopithecus ogouensis); within the genus Etythrocebus (Patas Monkey, Erythrocebus patas); within the genus Chlorocebus (Green Monkey, Chlorocebus sabaceus; Grivet, Chlorocebus aethiops; Bale Mountains Vervet, Chlorocebus djamdjamensis; Tantalus Monkey, Chlorocebus tantalus; Vervet Monkey, Chlorocebus pygerythrus; Malbrouck, Chlorocebus cynosuros); or within the genus Cercopithecus (Dryas Monkey or Salongo Monkey, Cercopithecus dryas; Diana Monkey, Cercopithecus diana; Roloway Monkey, Cercopithecus roloway; Greater Spot-nosed Monkey, Cercopithecus nictitans; Blue Monkey, Cercopithecus mitis; Silver Monkey, Cercopithecus doggetti; Golden Monkey, Cercopithecus kandti; Sykes's Monkey, Cercopithecus albogularis; Mona Monkey, Cercopithecus mona; Campbell's Mona Monkey, Cercopithecus campbelli; Lowe's Mona Monkey, Cercopithecus lowei; Crested Mona Monkey, Cercopithecus pogonias; Wolf's Mona Monkey, Cercopithecus wolfi; Dent's Mona Monkey, Cercopithecus denti; Lesser Spot-nosed Monkey, Cercopithecus petaurista; White-throated Guenon, Cercopithecus erythrogaster, Sclater's Guenon, Cercopithecus sclateri; Red-eared Guenon, Cercopithecus erythrotis; Moustached Guenon, Cercopithecus cephus; Red-tailed Monkey, Cercopithecus ascanius; L'Hoest's Monkey, Cercopithecus lhoesti; Preuss's Monkey, Cercopithecus preussi; Sun-tailed Monkey, Cercopithecus solatus; Hamlyn's Monkey or Owl-faced Monkey, Cercopithecus hamlyni; De Brazza's Monkey, Cercopithecus neglectus).

[0037] Alternatively, an advantageous non-chimpanzee primate, also within the subfamily Cercopithecinae but within the Tribe Papionini, may be from within the genus Macaca (Barbary Macaque, Macaca sylvanus; Lion-tailed Macaque, Macaca silenus; Southern Pig-tailed Macaque or Beruk, Macaca nemestrina; Northern Pig-tailed Macaque, Macaca leonina; Pagai Island Macaque or Bokkoi, Macaca pagensis; Siberut Macaque, Macaca siberu; Moor Macaque, Macaca maura; Booted Macaque, Macaca ochreata; Tonkean Macaque, Macaca tonkeana; Heck's Macaque, Macaca hecki; Gorontalo Macaque, Macaca nigriscens; Celebes Crested Macaque or Black “Ape”, Macaca nigra; Cynomolgus monkey or Crab-eating Macaque or Long-tailed Macaque or Kera, Macaca fascicularis; Stump-tailed Macaque or Bear Macaque, Macaca arctoides; Rhesus Macaque, Macaca mulatta; Formosan Rock Macaque, Macaca cyclopis; Japanese Macaque, Macaca fuscata; Toque Macaque, Macaca sinica; Bonnet Macaque, Macaca radiata; Barbary Macaque, Macaca sylvanmus; Assam Macaque, Macaca assamensis; Tibetan Macaque or Milne-Edwards' Macaque, Macaca thibetana; Arunachal Macaque or Munzala, Macaca munzala); within the genus Lophocebus (Gray-cheeked Mangabey, Lophocebus albigena; Lophocebus albigena albigena; Lophocebus albigena osmani; Lophocebus albigena johnstoni; Black Crested Mangabey, Lophocebus aterrimus; Opdenbosch's Mangabey, Lophocebus opdenboschi; Highland Mangabey, Lophocebus kipunji); within the genus Papio (Hamadryas Baboon, Papio hamadryas; Guinea Baboon, Papio papio; Olive Baboon, Papio anubis; Yellow Baboon, Papio cynocephalus; Chacma Baboon, Papio ursinus); within the genus Theropithecus (Gelada, Theropithecus gelada); within the genus Cercocebus (Sooty Mangabey, Cercocebus atys; Cercocebus atys atys; Cercocebus atys lunulatus; Collared Mangabey, Cercocebus torquatus; Agile Mangabey, Cercocebus agilis; Golden-bellied Mangabey, Cercocebus chrysogaster, Tana River Mangabey, Cercocebus galeritus; Sanje Mangabey, Cercocebus sanjei); or within the genus Mandrillus (Mandrill, Mandrillus sphinx; Drill, Mandrillus leucophaeus).

[0038] Most preferred is Macaca fascicularis (also known as Cynomolgus monkey and, therefore, in the Examples named “Cynomolgus”) and Macaca mulatta (rhesus monkey, named “rhesus”).

[0039] Within the subfamily Colobinae, an advantageous non-chimpanzee primate may be from the African group, within the genus Colobus (Black Colobus, Colobus satanas; Angola Colobus, Colobus angolensis; King Colobus, Colobus polykomos; Ursine Colobus, Colobus vellerosus; Mantled Guereza, Colobus guereza); within the genus Piliocolobus (Western Red Colobus, Piliocolobus badius; Piliocolobus badius badius; Piliocolobus badius temminckii; Piliocolobus badius waldronae; Pennant's Colobus, Piliocolobus pennantii; Piliocolobus pennantii pennantii; Piliocolobus pennantii epieni; Piliocolobus pennantii bouvieri; Preuss's Red Colobus, Piliocolobus preussi; Thollon's Red Colobus, Piliocolobus tholloni; Central African Red Colobus, Piliocolobus foal; Piliocolobus foal foal; Piliocolobus foal ellioti; Piliocolobus foal oustaleti; Piliocolobus foal semlikiensis; Piliocolobus foal parmentierorum; Ugandan Red Colobus, Piliocolobus tephrosceles; Uzyngwa Red Colobus, Piliocolobus gordonorum; Zanzibar Red Colobus, Piliocolobus kirkii; Tana River Red Colobus, Piliocolobus rufomitratus); or within the genus Procolobus (Olive Colobus, Procolobus verus).

[0040] Within the subfamily Colobinae, an advantageous non-chimpanzee primate may alternatively be from the Langur (leaf monkey) group, within the genus Semnopithecus (Nepal Gray Langur, Semnopithecus schistaceus; Kashmir Gray Langur, Semnopithecus ajax; Tarai Gray Langur, Semnopithecus hector, Northern Plains Gray Langur, Semnopithecus entellus; Black-footed Gray Langur, Semnopithecus hypoleucos; Southern Plains Gray Langur, Semnopithecus dussumieri; Tufted Gray Langur, Semnopithecus priam); within the T. vetulus group or the genus Trachypithecus (Purple-faced Langur, Trachypithecus vetulus; Nilgiri Langur, Trachypithecus johnii); within the T. cristatus group of the genus Trachypithecus (Javan Lutung, Trachypithecus auratus; Silvery Leaf Monkey or Silvery Lutung, Trachypithecus cristatus; Indochinese Lutung, Trachypithecus germaini; Tenasserim Lutung, Trachypithecus barbel); within the T. obscurus group of the genus Trachypithecus (Dusky Leaf Monkey or Spectacled Leaf Monkey, Trachypithecus obscurus; Phayre's Leaf Monkey, Trachypithecus phayrei); within the T. pileatus group of the genus Trachypithecus (Capped Langur, Trachypithecus pileatus; Shortridge's Langur, Trachypithecus shortridgei; Gee's Golden Langur, Trachypithecus geei); within the T. francoisi group of the genus Trachypithecus (Francois' Langur, Trachypithecus francoisi; Hatinh Langur, Trachypithecus hatinhensis; White-headed Langur, Trachypithecus poliocephalus; Laotian Langur, Trachypithecus laotum; Delacour's Langur, Trachypithecus delacouri; Indochinese Black Langur, Trachypithecus ebenus); or within the genus Presbytis (Sumatran Surili, Presbytis melalophos; Banded Surili, Presbytis femoralis; Sarawak Surili, Presbytis chrysomelas; White-thighed Surili, Presbytis siamensis; White-fronted Surili, Presbytis frontata; Javan Surili, Presbytis comata; Thomas's Langur, Presbytis thomasi; Hose's Langur, Presbytis hosei; Maroon Leaf Monkey, Presbytis rubicunda; Mentawai Langur or Joja, Presbytis potenziani; Natuna Island Surili, Presbytis natunae).

[0041] Within the subfamily Colobinae, an advantageous non-chimpanzee primate may alternatively be from the Odd-Nosed group, within the genus Pygathrix (Red-shanked Douc, Pygathrix nemaeus; Black-shanked Douc, Pygathrix nigripes; Gray-shanked Douc, Pygathrix cinerea); within the genus Rhinopithecus (Golden Snub-nosed Monkey, Rhinopithecus roxellana; Black Snub-nosed Monkey, Rhinopithecus bieti; Gray Snub-nosed Monkey, Rhinopithecus brelichi; Tonkin Snub-nosed Langur, Rhinopithecus avunculus); within the genus Nasalis (Proboscis Monkey, Nasalis larvatus); or within the genus Simias (Pig-tailed Langur, Simias concolor).

[0042] As used herein, the term “marmoset” denotes any New-World Monkeys of the genus Callithrix, for example belonging to the Atlantic marmosets of subgenus Callithrix (sic!) (Common Marmoset, Callithrix (Callithrix) jacchus; Black-tufted Marmoset, Callithrix (Callithrix) penicillata; Wied's Marmoset, Callithrix (Callithrix) kuhlii; White-headed Marmoset, Callithrix (Callithrix) geoffroyi; Buffy-headed Marmoset, Callithrix (Callithrix) flaviceps; Buffy-tufted Marmoset, Callithrix (Callithrix) aurita); belonging to the Amazonian marmosets of subgenus Mico (Rio Acari Marmoset, Callithrix (Mico) acariensis; Manicore Marmoset, Callithrix (Mico) manicorensis; Silvery Marmoset, Callithrix (Mico) argentata; White Marmoset, Callithrix (Mico) leucippe; Emilia's Marmoset, Callithrix (Mico) emiliae; Black-headed Marmoset, Callithrix (Mico) nigriceps; Marca's Marmoset, Callithrix (Mico) marcai; Black-tailed Marmoset, Callithrix (Mico) melanura; Santarem Marmoset, Callithrix (Mico) humeralifera; Maués Marmoset, Callithrix (Mico) mauesi; Gold-and-white Marmoset, Callithrix (Mico) chrysoleuca; Hershkovitz's Marmoset, Callithrix (Mico) intermedia; Satéré Marmoset, Callithrix (Mico) saterei); Roosmalens' Dwarf Marmoset belonging to the subgenus Callibella (Callithrix (Callibella) humilis); or the Pygmy Marmoset belonging to the subgenus Cebuella (Callithrix (Cebuella) pygmaea).

[0043] Other genera of the New-World Monkeys comprise tamarins of the genus Saguinus (comprising the S. oedipus-group, the S. midas group, the S. nigricollis group, the S. mystax group, the S. bicolor group and the S. inustus group) and squirrel monkeys of the genus Samiri (e.g. Saimiri sciureus, Saimiri oerstedii, Saimiri ustus, Saimiri boliviensis, Saimiri vanzolini)

[0044] The term “binding domain” characterizes in connection with the present invention a domain of a polypeptide which specifically binds/interacts with a given target structure/antigen/epitope. Thus, the binding domain is an “antigen-interaction-site”. The term “antigen-interaction-site” defines, in accordance with the present invention, a motif of a polypeptide, which is able to specifically interact with a specific antigen or a specific group of antigens, e.g. the identical antigen in different species. Said binding/interaction is also understood to define a “specific recognition”. The term “specifically recognizing” means in accordance with this invention that the antibody molecule is capable of specifically interacting with and/or binding to at least two, preferably at least three, more preferably at least four amino acids of an antigen, e.g. the human CD3 antigen as defined herein. Such binding may be exemplified by the specificity of a “lock-and-key-principle”. Thus, specific motifs in the amino acid sequence of the binding domain and the antigen bind to each other as a result of their primary, secondary or tertiary structure as well as the result of secondary modifications of said structure. The specific interaction of the antigen-interaction-site with its specific antigen may result as well in a simple binding of said site to the antigen. Moreover, the specific interaction of the antigen-interaction-site with its specific antigen may alternatively result in the initiation of a signal, e.g. due to the induction of a change of the conformation of the antigen, an oligomerization of the antigen, etc. A preferred example of a binding domain in line with the present invention is an antibody. The binding domain may be a monoclonal or polyclonal antibody or derived from a monoclonal or polyclonal antibody.

[0045] The term “antibody” comprises derivatives or functional fragments thereof which still retain the binding specificity. Techniques for the production of antibodies are well known in the art and described, e.g. in Harlow and Lane “Antibodies, A Laboratory Manual”, Cold Spring Harbor Laboratory Press, 1988 and Harlow and Lane “Using Antibodies: A Laboratory Manual” Cold Spring Harbor Laboratory Press, 1999. The term “antibody” also comprises immunoglobulins (Ig's) of different classes (i.e. IgA, IgG, IgM, IgD and IgE) and subclasses (such as IgG1, IgG2 etc.). These antibodies can be used, for example, for the immunoprecipitation, affinity purification and immunolocalization of the polypeptides or fusion proteins of the invention as well as for the monitoring of the presence and amount of such polypeptides, for example, in cultures of recombinant prokaryotes or eukaryotic cells or organisms.

[0046] The definition of the term “antibody” also includes embodiments such as chimeric, single chain and humanized antibodies, as well as antibody fragments, like, inter alia, Fab fragments. Antibody fragments or derivatives further comprise F(ab′)₂, Fv, scFv fragments or single domain antibodies, single variable domain antibodies or immunoglobulin single variable domain comprising merely one variable domain, which might be VH or VL, that specifically bind an antigen or epitope independently of other V regions or domains; see, for example, Harlow and Lane (1988) and (1999), loc. cit. Such immunoglobulin single variable domain encompasses not only an isolated antibody single variable domain polypeptide, but also larger polypeptides that comprise one or more monomers of an antibody single variable domain polypeptide sequence.

[0047] Various procedures are known in the art and may be used for the production of such antibodies and/or fragments. Thus, the (antibody) derivatives can be produced by peptidomimetics. Further, techniques described for the production of single chain antibodies (see, inter alia, U.S. Pat. No. 4,946,778) can be adapted to produce single chain antibodies specific for elected polypeptide(s). Also, transgenic animals may be used to express humanized antibodies specific for polypeptides and fusion proteins of this invention. For the preparation of monoclonal antibodies, any technique, providing antibodies produced by continuous cell line cultures can be used. Examples for such techniques include the hybridoma technique (Köhler and Milstein Nature 256 (1975), 495-497), the trioma technique, the human B-cell hybridoma technique (Kozbor, Immunology Today 4 (1983), 72) and the EBV-hybridoma technique to produce human monoclonal antibodies (Cole et al., Monoclonal Antibodies and Cancer Therapy, Alan R. Liss, Inc. (1985), 77-96). Surface plasmon resonance as employed in the BIAcore system can be used to increase the efficiency of phage antibodies which bind to an epitope of a target polypeptide, such as CD3 epsilon (Schier, Human Antibodies Hybridomas 7 (1996), 97-105; Malmborg, J. Immunol. Methods 183 (1995), 7-13). It is also envisaged in the context of this invention that the term “antibody” comprises antibody constructs, which may be expressed in a host as described herein below, e.g. antibody constructs which may be transfected and/or transduced via, inter alia, viruses or plasmid vectors.

[0048] The term “specific interaction” as used in accordance with the present invention means that the binding (domain) molecule does not or does not significantly cross-react with polypeptides which have similar structure as those bound by the binding molecule, and which might be expressed by the same cells as the polypeptide of interest. Cross-reactivity of a panel of binding molecules under investigation may be tested, for example, by assessing binding of said panel of binding molecules under conventional conditions (see, e.g., Harlow and Lane, Antibodies: A Laboratory Manual, Cold Spring Harbor Laboratory Press, 1988 and Using Antibodies: A Laboratory Manual, Cold Spring Harbor Laboratory Press, 1999). Examples for the specific interaction of a binding domain with a specific antigen comprise the specificity of a ligand for its receptor. Said definition particularly comprises the interaction of ligands, which induce a signal upon binding to its specific receptor. Examples for said interaction, which is also particularly comprised by said definition, is the interaction of an antigenic determinant (epitope) with the binding domain (antigenic binding site) of an antibody.

[0049] The term “cross-species specificity” or “interspecies specificity” as used herein means binding of a binding domain described herein to the same target molecule in humans and non-chimpanzee primates. Thus, “cross-species specificity” or “interspecies specificity” is to be understood as an interspecies reactivity to the same molecule X expressed in different species, but not to a molecule other than X. Cross-species specificity of a monoclonal antibody recognizing e.g. human CD3 epsilon, to a non-chimpanzee primate CD3 epsilon, e.g. macaque CD3 epsilon, can be determined, for instance, by FACS analysis. The FACS analysis is carried out in a way that the respective monoclonal antibody is tested for binding to human and non-chimpanzee primate cells, e.g. macaque cells, expressing said human and non-chimpanzee primate CD3 epsilon antigens, respectively. An appropriate assay is shown in the following examples.

[0050] As used herein, CD3 epsilon denotes a molecule expressed as part of the T cell receptor and has the meaning as typically ascribed to it in the prior art. In human, it encompasses in individual or independently combined form all known CD3 subunits, for example CD3 epsilon, CD3 delta, CD3 gamma, CD3 zeta, CD3 alpha and CD3 beta. The non-chimpanzee primate CD3 antigens as referred to herein are, for example, Macaca fascicularis CD3 and Macaca mulatta CD3. In Macaca fascicularis, it encompasses CD3 epsilon FN-18 negative and CD3 epsilon FN-18 positive, CD3 gamma and CD3 delta. In Macaca mulatta, it encompasses CD3 epsilon, CD3 gamma and CD3 delta. Preferably, said CD3 as used herein is CD3 epsilon.

[0051] The human CD3 epsilon is indicated in GenBank Accession No. NM_{—}000733 and comprises SEQ ID NO. 1. The human CD3 gamma is indicated in GenBank Accession NO. NM_{—}000073. The human CD3 delta is indicated in GenBank Accession No. NM_{—}000732.

[0052] The CD3 epsilon “FN-18 negative” of Macaca fascicularis (i.e. CD3 epsilon not recognized by monoclonal antibody FN-18 due to a polymorphism as set forth above) is indicated in GenBank Accession No. AB073994.

[0053] The CD3 epsilon “FN-18 positive” of Macaca fascicularis (i.e. CD3 epsilon recognized by monoclonal antibody FN-18) is indicated in GenBank Accession No. AB073993. The CD3 gamma of Macaca fascicularis is indicated in GenBank Accession No. AB073992. The CD3 delta of Macaca fascicularis is indicated in GenBank Accession No. AB073991.

[0054] The nucleic acid sequences and amino acid sequences of the respective CD3 epsilon, gamma and delta homologs of Macaca mulatta can be identified and isolated by recombinant techniques described in the art (Sambrook et al. Molecular Cloning: A Laboratory Manual; Cold Spring Harbor Laboratory Press, 3^{rd} edition 2001). This applies mutatis mutandis to the CD3 epsilon, gamma and delta homologs of other non-chimpanzee primates as defined herein. The identification of the amino acid sequence of Callithrix jacchus, Saimiri sciureus and Saguinus oedipus is described in the appended examples. The amino acid sequence of the extracellular domain of the CD3 epsilon of Callithrix jacchus is depicted in SEQ ID NO: 3, the one of Saguinus oedipus is depicted in SEQ ID NO: 5 and the one of Saimiri sciureus is depicted in SEQ ID NO: 7.

[0055] In line with the above the term “epitope” defines an antigenic determinant, which is specifically bound/identified by a binding molecule as defined above. The binding domain or molecules may specifically bind to/interact with conformational or continuous epitopes, which are unique for the target structure, e.g. the human and non-chimpanzee primate CD3 epsilon chain. A conformational or discontinuous epitope is characterized for polypeptide antigens by the presence of two or more discrete amino acid residues which are separated in the primary sequence, but come together on the surface of the molecule when the polypeptide folds into the native protein/antigen (Seta, (1969) Science 166, 1365 and Layer, (1990) Cell 61, 553-6). The two or more discrete amino acid residues contributing to the epitope are present on separate sections of one or more polypeptide chain(s). These residues come together on the surface of the molecule when the polypeptide chain(s) fold(s) into a three-dimensional structure to constitute the epitope. In contrast, a continuous or linear epitope consists of two or more discrete amino acid residues, which are present in a single linear segment of a polypeptide chain. Within the present invention, a “context-dependent” CD3 epitope refers to the conformation of said epitope. Such a context-dependent epitope, localized on the epsilon chain of CD3, can only develop its correct conformation if it is embedded within the rest of the epsilon chain and held in the right position by heterodimerization of the epsilon chain with either CD3 gamma or delta chain. In contrast, a context-independent CD3 epitope as provided herein refers to an N-terminal 1-27 amino acid residue polypeptide or a functional fragment thereof of CD3 epsilon. This N-terminal 1-27 amino acid residue polypeptide or a functional fragment thereof maintains its three-dimensional structural integrity and correct conformation when taken out of its native environment in the CD3 complex. The context-independency of the N-terminal 1-27 amino acid residue polypeptide or a functional fragment thereof, which is part of the extracellular domain of CD3 epsilon, represents, thus, an epitope which is completely different to the epitopes of CD3 epsilon described in connection with a method for the preparation of human binding molecules in WO 2004/106380. Said method used solely expressed recombinant CD3 epsilon. The conformation of this solely expressed recombinant CD3 epsilon differed from that adopted in its natural form, that is, the form in which the CD3-epsilon subunit of the TCR/CD3 complex exists as part of a noncovalent complex with either the CD3-delta or the CD3-gamma subunit of the TCR/CD3 complex. When such solely expressed recombinant CD3-epsilon protein is used as an antigen for selection of antibodies from an antibody library, antibodies specific for this antigen are identified from the library although such a library does not contain antibodies with specificity for self-antigens/autoantigens. This is due to the fact that solely expressed recombinant CD3-epsilon protein does not exist in vivo; it is not an autoantigen. Consequently, subpopulations of B cells expressing antibodies specific for this protein have not been depleted in vivo; an antibody library constructed from such B cells would contain genetic material for antibodies specific for solely expressed recombinant CD3-epsilon protein.

[0056] However, since the context-independent N-terminal 1-27 amino acid residue polypeptide or a functional fragment thereof is an epitope, which folds in its native form, binding domains in line with the present invention cannot be identified by methods based on the approach described in WO 04/106380. Therefore, it could be verified in tests that binding molecules as disclosed in WO 04/106380 are not capable of binding to the N-terminal 1-27 amino acid residues of the CD3 epsilon chain. Hence, conventional anti-CD3 binding molecules or anti-CD3 antibody molecules (e.g. as disclosed in WO 99/54440) bind CD3 epsilon chain at a position which is more C-terminally located than the context-independent N-terminal 1-27 amino acid residue polypeptide or a functional fragment provided herein. Prior art antibody molecules OKT3 and UCHT-1 have also a specificity for the epsilon-subunit of the TCR/CD3 complex between amino acid residues 35 to 85 and, accordingly, the epitope of these antibodies is also more C-terminally located. In addition, UCHT-1 binds to the CD3 epsilon chain in a region between amino acid residues 43 to 77 (Tunnacliffe, Int. Immunol. 1 (1989), 546-50; Kjer-Nielsen, PNAS 101, (2004), 7675-7680; Salmeron, J. Immunol. 147 (1991), 3047-52). Therefore, prior art anti-CD3 molecules do not bind to and are not directed against the herin defined context-independent N-terminal 1-27 amino acid residue epitope (or a functional fragment thereof).

[0057] For the generation of a, preferably human, binding domain comprised in a polypeptide of the invention, e.g. in a bispecific single, chain antibody as defined herein, e.g. monoclonal antibodies binding to both the human and non-chimpanzee primate CD3 epsilon (e.g. macaque CD3 epsilon) can be used.

[0058] In a preferred embodiment of the polypeptide of the invention, the non-chimpanzee primate is an old world monkey. In a more preferred embodiment of the polypeptide, the old world monkey is a monkey of the Papio genus Macaque genus. Most preferably, the monkey of the Macaque genus is Assamese macaque (Macaca assamensis), Barbary macaque (Macaca sylvanus), Bonnet macaque (Macaca radiata), Booted or Sulawesi-Booted macaque (Macaca ochreata), Sulawesi-crested macaque (Macaca nigra), Formosan rock macaque (Macaca cyclopsis), Japanese snow macaque or Japanese macaque (Macaca fuscata), Cynomologus monkey or crab-eating macaque or long-tailed macaque or Java macaque (Macaca fascicularis), Lion-tailed macaque (Macaca silenus), Pigtailed macaque (Macaca nemestrina), Rhesus macaque (Macaca mulatta), Tibetan macaque (Macaca thibetana), Tonkean macaque (Macaca tonkeana), Toque macaque (Macaca sinica), Stump-tailed macaque or Red-faced macaque or Bear monkey (Macaca arctoides), or Moor macaque (Macaca maurus). Most preferably, the monkey of the Papio genus is Hamadryas Baboon, Papio hamadryas; Guinea Baboon, Papio papio; Olive Baboon, Papio anubis; Yellow Baboon, Papio cynocephalus; Chacma Baboon, Papio ursinus

[0059] In an alternatively preferred embodiment of the polypeptide of the invention, the non-chimpanzee primate is a new world monkey. In a more preferred embodiment of the polypeptide, the new world monkey is a monkey of the Callithrix genus (marmoset), the Saguinus genus or the Samiri genus. Most preferably, the monkey of the Callithrix genus is Callithrix jacchus, the monkey of the Saguinus genus is Saguinus oedipus and the monkey of the Samiri genus is Saimiri sciureus.

[0060] As described herein above the polypeptide of the invention binds with the first binding domain to an epitope of human and non-chimpanzee primate CD3ε (epsilon) chain, wherein the epitope is part of an amino acid sequence comprised in the group consisting of 27 amino acid residues as depicted in SEQ ID NOs. 2, 4, 6, or 8. In line with the present invention it is preferred for the polypeptide of the invention that said epitope is part of an amino acid sequence comprising 26, 25, 24, 23, 22, 21, 20, 19, 18, 17, 16, 15, 14, 13, 12, 11, 10, 9, 8, 7, 6 or 5 amino acids.

[0061] More preferably, wherein said epitope comprises at least the amino acid sequence Gln-Asp-Gly-Asn-Glu (Q-D-G-N-E-D).

[0062] Within the present invention, a “functional fragment of the N-terminal 1-27 amino acid residues” means that said functional fragment is still a context-independent epitope maintaining its three-dimensional structural integrity when taken out of its native environment in the CD3 complex (and fused to a heterologous amino acid sequence such as EpCAM or an immunoglobulin Fc part, e.g. as shown in Example 3.1). The maintenance of the three-dimensional structure within the 27 amino acid N-terminal polypeptide or functional fragment thereof of CD3 epsilon can be used for the generation of binding domains which bind to the N-terminal CD3 epsilon polypeptide fragment in vitro and to the native (CD3 epsilon subunit of the) CD3 complex on T cells in vivo with the same binding affinity. Within the present invention, a functional fragment of the N-terminal 1-27 amino acid residues means that CD3 binding molecules provided herein can still bind to such functional fragments in a context-independent manner. The person skilled in the art is aware of methods for epitope mapping to determine which amino acid residues of an epitope are recognized by such anti-CD3 binding molecules (e.g. alanin scanning or pep spot analysis).

[0063] In a preferred embodiment of the invention, the polypeptide of the invention comprises a (first) binding domain capable of binding to an epitope of human and non-chimpanzee primate CD36 chain and a second binding domain capable of binding to a cell surface antigen.

[0064] The term “cell surface antigen” as used herein denotes a molecule, which is displayed on the surface of a cell. In most cases, this molecule will be located in or on the plasma membrane of the cell such that at least part of this molecule remains accessible from outside the cell in tertiary form. A non-limiting example of a cell surface molecule, which is located in the plasma membrane is a transmembrane protein comprising, in its tertiary conformation, regions of hydrophilicity and hydrophobicity. Here, at least one hydrophobic region allows the cell surface molecule to be embedded, or inserted in the hydrophobic plasma membrane of the cell while the hydrophilic regions extend on either side of the plasma membrane into the cytoplasm and extracellular space, respectively. Non-limiting examples of cell surface molecules which are located on the plasma membrane are proteins which have been modified at a cysteine residue to bear a palmitoyl group, proteins modified at a C-terminal cysteine residue to bear a farnesyl group or proteins which have been modified at the C-terminus to bear a glycosyl phosphatidyl inositol (“GPI”) anchor. These groups allow covalent attachment of proteins to the outer surface of the plasma membrane, where they remain accessible for recognition by extracellular molecules such as antibodies. Examples of cell surface antigens include EGFR, EGFRvIII, MCSP, Carbonic anhydrase IX (CAIX), CD30, CD33, Her2/neu, IgE, CD44v6 and Muc-1. Additionally, examples for corresponding cell surface antibodies comprise antigens which are characteristic for a specific disease or ailment, i.e. cancer, autoimmune diseases or infections diseases including viral infections. Accordingly, the term “cell surface antigens” explicitly includes viral proteins such as native, unprocessed viral proteins exposed on the surface of infected cells (described inter alia for envelop proteins of Hepatitis virus B, C and HIV-1).

[0065] One defense function of cytotoxic T cells is the destruction of virus-infected cells, therefore, the unique property of the bispecific binding molecules of the invention to activate and redirect cytotoxic T cells irrespecitve of their autochthonous specificity has a great impact on the broad field of chronic virus infections. For the majority of these infections elimination of persistently infected cells is the only chance for cure. Currently, adoptive T cell therapies are currently being developed against chronic CMV and EBV infections (Rooney, C. M., et al., Use of gene-modified virus-specific T lymphocytes to control Epstein-Barr-virus-related lymphoproliferation. Lancet, 1995. 345 (8941): p. 9-13; Walter, E. A., et al., Reconstitution of cellular immunity against cytomegalovirus in recipients of allogeneic bone marrow by transfer of T-cell clones from the donor. N Engl J Med, 1995. 333 (16): p. 1038-44).

[0066] Chronic hepatitis B infection is clearly one of the most interesting and rewarding indications. Worldwide between 350 and 400 million people are infected with HBV. Current treatment of chronic HBV hepatitis rests on interferon γ, and nucleosid or nucleotide analogues, a long term therapy with considerable side-effects such as induction of hepatitis flares, fever, myalgias, thrombocytopenia and depression. Although there are now more than 4 approved therapeutic regimens, elimination of the virus is rarely achieved. A persistent inflammation in chronic hepatitis B leads to liver cirrhosis and hepatocellular carcinoma in more than 25% of patients. Moreover, up to 40% of patients with chronic hepatitis B will die from serious complications, accounting for 0.6 to 1.0 million deaths per year worldwide

[0067] HBV, the prototype of the Hepadnaviruses is an enveloped virus whose relaxed circular (rc) genome is reverse transcribed into an RNA pregenome. After infection the rc DNA is imported into the hepatocyte nucleus where it is completed to a covalently closed circular DNA (cccDNA) containing four overlapping reading frames. It serves as transcription template for the pregenomic RNA and three subgenomic RNAs. The RNA pregenome functions as mRNA for translation of the viral core and polymerase protein. Infected cells produce continuously HBV surface protein (HBsAg) from the cccDNA even when HBV replication is stopped. HBsAg consists of the small surface (S) proteins with very few portions of middle and large (L) surface proteins. Both the HBV S and L are targeted to the Endoplasmatic Reticulum (ER) membrane from where they are transported in membrane vesicles via the trans golgi organelle to the plasma membrane (Gorelick, F. S, and C. Shugrue, Exiting the endoplasmic reticulum. Mol Cell Endocrinol, 2001. 177 (1-2): p. 13-8). S and L proteins are permanently expressed on the surface of HBV replicating hepatocytes as shown recently (Chu, C. M. and Y. F. Liaw, Membrane staining for hepatitis B surface antigen on hepatocytes: a sensitive and specific marker of active viral replication in hepatitis B. J Clin Pathol, 1995. 48(5): p. 470-3).

[0068] Prototype viruses that expose envelope proteins at the cell surface are Hepatitis virus B (HBV), Hepatitis virus C (HCV) and HIV-1 both of which represent an enormous burden of disease globally. For the HIV-1 virus indication, it has recently been shown that T cells modified by a chimeric TCR with an Fv antibody construct directed at the gp120 envelope protein can kill HIV-1 infected target cells (Masiero, S., et al., T-cell engineering by a chimeric T-cell receptor with antibody-type specificity for the HIV-1 gp120. Gene Ther, 2005. 12 (4): p. 299-310). Of the hepadna viruses, hepatitis virus B (HBV) expresses the envelope protein complex HBsAg which is continuously produced from episomal cccDNA even when HBV replication subsides.

[0069] The expression as intact S and L HBV proteins on the cell surface makes them accessible for antibodies which are the hallmark of seroconversion when patiens recover from the acute phase of infections and change from circulating HBsAg to antiHBs. If seroconversion does not occur, up to 30% of hepatocytes continue to express HBV S protein also after highly active antiviral therapy of long duration. Thus beyond T lymphocytes recognizing specifically intracellularly processed HBV peptides and presented by MHC molecules at the cell surface other forms of T cell engagement are feasible aimed at intact surface protein such as S and L antigens accessible in the outer cell membrane. Using single chain antibody fragments recognizing hepatitis B virus small (S) and large (L) envelope proteins, artificial T-cell receptors have been generated which allow directing grafted T-cells to infected hepatocytes and upon antigen contact activation of these T-cells to secrete cytokines and kill infected hepatocytes.

[0070] The limitation of this approach is, (i) that T-cells need to be manipulated in vitro, (ii) retroviruses used to transfer the T-cell receptors may cause insertional mutagenesis in the T-cells, and (iii) that once T-cells have been transferred the cytotoxic response cannot be limited.

[0071] To overcome these limitations, bispecific single chain antibody molecules comprising a first domain with a binding specificity for the human and the non-chimpanzee primate CD3 epsilon antigen (as provided herin in context of this invention) as well as a second domain with a binding specificity for HBV or HCV envelop proteins of infected hepatocytes may be generated and are within the scope of this invention.

[0072] Within the present invention it is further preferred that the second binding domain binds to the humancell surface antigen and/or the non-chimpanzee primate counterparts of the human cell surface antigens selected from EGFR, Her2/neu or IgE.

[0073] For the generation of the second binding domain of the polypeptide of the invention, e.g. bispecific single chain antibodies as defined herein, monoclonal antibodies binding to both of the respective human and/or non-chimpanzee primate cell surface antigens can be utilized. Appropriate binding domains for the bispecific polypeptide as defined herein e.g. can be derived from cross-species specific monoclonal antibodies by recombinant methods described in the art. A monoclonal antibody binding to a human cell surface antigen and to the homolog of said cell surface antigen in a non-chimpanzee primate can be tested by FACS assays as set forth above. It is evident to those skilled in the art that cross-species specific antibodies can also be generated by hybridoma techniques described in the literature (Milstein and Köhler, Nature 256 (1975), 495-7). For example, mice may be alternately immunized with human and non-chimpanzee primate CD33. From these mice, cross-species specific antibody-producing hybridoma cells are isolated via hybridoma technology and analysed by FACS as set forth above. The generation and analysis of bispecific polypeptides such as bispecific single chain antibodies exhibiting cross-species specificity as described herein is shown in the following examples. The advantages of the bispecific single chain antibodies exhibiting cross-species specificity include the points enumerated below.

[0074] It is particularly preferred for the polypeptide of the invention that the first binding domain capable of binding to an epitope of human and non-chimpanzee primate CD3ε chain comprises a VL region comprising CDR-L1, CDR-L2 and CDR-L3 selected from:
[0075] (a) CDR-L1 as depicted in SEQ ID NO. 27, CDR-L2 as depicted in SEQ ID NO. 28 and CDR-L3 as depicted in SEQ ID NO. 29;
[0076] (b) CDR-L1 as depicted in SEQ ID NO. 117, CDR-L2 as depicted in SEQ ID NO. 118 and CDR-L3 as depicted in SEQ ID NO. 119; and
[0077] (c) CDR-L1 as depicted in SEQ ID NO. 153, CDR-L2 as depicted in SEQ ID NO. 154 and CDR-L3 as depicted in SEQ ID NO. 155.

[0078] The variable regions, i.e. the variable light chain (“L” of “VL”) and the variable heavy chain (“H” or “VH”) are understood in the art to provide the binding domain of an antibody. This variable regions harbor the complementary determining regions. The term “complementary determining region” (CDR) is well known in the art to dictate the antigen specificity of an antibody. The term “CDR-L” or “L CDR” refers to CDRs in the VL, whereas the term “CDR-H” or “H CDR” refers to the CDRs in the VH.

[0079] In an alternatively preferred embodiment of the polypeptide of the invention the first binding domain capable of binding to an epitope of human and non-chimpanzee primate CD3ε chain comprises a VH region comprising CDR-H1, CDR-H2 and CDR-H3 selected from:
[0080] (a) CDR-H1 as depicted in SEQ ID NO. 12, CDR-H2 as depicted in SEQ ID NO. 13 and CDR-H3 as depicted in SEQ ID NO. 14;
[0081] (b) CDR-H1 as depicted in SEQ ID NO. 30, CDR-H2 as depicted in SEQ ID NO. 31 and CDR-H3 as depicted in SEQ ID NO. 32;
[0082] (c) CDR-H1 as depicted in SEQ ID NO. 48, CDR-H2 as depicted in SEQ ID NO. 49 and CDR-H3 as depicted in SEQ ID NO. 50;
[0083] (d) CDR-H1 as depicted in SEQ ID NO. 66, CDR-H2 as depicted in SEQ ID NO. 67 and CDR-H3 as depicted in SEQ ID NO. 68;
[0084] (e) CDR-H1 as depicted in SEQ ID NO. 84, CDR-H2 as depicted in SEQ ID NO. 85 and CDR-H3 as depicted in SEQ ID NO. 86;
[0085] (f) CDR-H1 as depicted in SEQ ID NO. 102, CDR-H2 as depicted in SEQ ID NO. 103 and CDR-H3 as depicted in SEQ ID NO. 104;
[0086] (g) CDR-H1 as depicted in SEQ ID NO. 120, CDR-H2 as depicted in SEQ ID NO. 121 and CDR-H3 as depicted in SEQ ID NO. 122;
[0087] (h) CDR-H1 as depicted in SEQ ID NO. 138, CDR-H2 as depicted in SEQ ID NO. 139 and CDR-H3 as depicted in SEQ ID NO. 140;
[0088] (i) CDR-H1 as depicted in SEQ ID NO. 156, CDR-H2 as depicted in SEQ ID NO. 157 and CDR-H3 as depicted in SEQ ID NO. 158; and
[0089] (j) CDR-H1 as depicted in SEQ ID NO. 174, CDR-H2 as depicted in SEQ ID NO. 175 and CDR-H3 as depicted in SEQ ID NO. 176.

[0090] It is further preferred that the first binding domain capable of binding to an epitope of human and non-chimpanzee primate CD3ε chain comprises a VL region selected from the group consisting of a VL region as depicted in SEQ ID NO. 35, 39, 125, 129, 161 or 165.

[0091] It is alternatively preferred that the first binding domain capable of binding to an epitope of human and non-chimpanzee primate CD3ε chain comprises a VH region selected from the group consisting of a VH region as depicted in SEQ ID NO. 15, 19, 33, 37, 51, 55, 69, 73, 87, 91, 105, 109, 123, 127, 141, 145, 159, 163, 177 or 181.

[0092] More preferably, the polypeptide of the invention is characterized by the first binding domain capable of binding to an epitope of human and non-chimpanzee primate CD3ε chain, which comprises a VL region and a VH region selected from the group consisting of:
[0093] (a) a VL region as depicted in SEQ ID NO. 17 or 21 and a VH region as depicted in SEQ ID NO. 15 or 19;
[0094] (b) a VL region as depicted in SEQ ID NO. 35 or 39 and a VH region as depicted in SEQ ID NO. 33 or 37;
[0095] (c) a VL region as depicted in SEQ ID NO. 53 or 57 and a VH region as depicted in SEQ ID NO. 51 or 55;
[0096] (d) a VL region as depicted in SEQ ID NO. 71 or 75 and a VH region as depicted in SEQ ID NO. 69 or 73;
[0097] (e) a VL region as depicted in SEQ ID NO. 89 or 93 and a VH region as depicted in SEQ ID NO. 87 or 91;
[0098] (f) a VL region as depicted in SEQ ID NO. 107 or 111 and a VH region as depicted in SEQ ID NO. 105 or 109;
[0099] (g) a VL region as depicted in SEQ ID NO. 125 or 129 and a VH region as depicted in SEQ ID NO. 123 or 127;
[0100] (h) a VL region as depicted in SEQ ID NO. 143 or 147 and a VH region as depicted in SEQ ID NO. 141 or 145;
[0101] (i) a VL region as depicted in SEQ ID NO. 161 or 165 and a VH region as depicted in SEQ ID NO. 159 or 163; and
[0102] (j) a VL region as depicted in SEQ ID NO. 179 or 183 and a VH region as depicted in SEQ ID NO. 177 or 181.

[0103] According to a preferred embodiment of the polypeptide of the invention the pairs of VH-regions and VL-regions are in the format of a single chain antibody (scFv). The VH and VL regions are arranged in the order VH-VL or VL-VH. It is preferred that the VH-region is positioned N-terminally to a linker sequence. The VL-region is positioned C-terminally of the linker sequence.

[0104] A preferred embodiment of the above described polypeptide of the invention is characterized by the first binding domain capable of binding to an epitope of human and non-chimpanzee primate CD3ε chain comprising an amino acid sequence selected from the group consisting of SEQ ID NOs: 23, 25, 41, 43, 59, 61, 77, 79, 95, 97, 113, 115, 131, 133, 149, 151, 167, 169, 185 or 187.

[0105] The invention further relates to an above described polypeptide, wherein the second binding domain binds to a cell surface antigen, which is preferably a tumor antigen.

[0106] The term “tumor antigen” as used herein may be understood as those antigens that are presented on tumor cells. These antigens can be presented on the cell surface with an extracellular part, which is often combined with a transmembrane and cytoplasmic part of the molecule. These antigens can sometimes be presented only by tumor cells and never by the normal ones. Tumor antigens can be exclusively expressed on tumor cells or might represent a tumor specific mutation compared to normal cells. In this case, they are called tumor-specific antigens. More common are antigens that are presented by tumor cells and normal cells, and they are called tumor-associated antigens. These tumor-associated antigens can be overexpressed compared to normal cells or are accessible for antibody binding in tumor cells due to the less compact structure of the tumor tissue compared to normal tissue. Non-limiting examples of tumor antigens as used herein are EGFR (Liu, Br. J. Cancer 82/12 (2000), 1991-1999; Bonner, Semin. Radiat. Oncol. 12 (2002), 11-20; Kiyota, Oncology 63/1 (2002), 92-98; Kuan, Brain Tumor Pathol. 17/2 (2000), 71-78).

[0107] EGFR (also known as c-erb1 or HER1) belongs to the erbB receptor tyrosine kinase family. When activated by binding of a ligand from the EGF family of growth factors, EGFR homodimerizes or heterodimerizes with a second EGFR or another member of the erbB receptor family, respectively, initiating a signaling cascade through mitogen-activated protein kinases and other transcription factors leading to proliferation, differentiation and repair (Olayioye, EMBO J. 19 (2000), 3159-67). EGFR is overexpressed in many epithelial cancers, including colorectal, breast, lung, and head and neck cancers (Mendelsohn, J. Clin. Oncol. 21 (2003), 2787-99; Mendelsohn, J. Clin. Oncol. 20 (18, Suppl.) (2002), 1S-13S; Prewett, Clin. Cancer Res. 8 (2002), 994-1003). Overexpression and/or mutation of EGFR in malignant cells leads to constitutive activation of kinase activity resulting in proliferation, angiogenesis, invasion, metastasis, and inhibition of apoptosis (Mendelsohn (2003, loc. cit.; Ciardiello, Clin. Cancer Res. 7 (2001), 2958-70; Perez-Soler, Oncologist 9 (2004), 58-67). Monoclonal antibodies that target the extracellular ligand binding domain or the intracellular tyrosine kinase signaling cascade of EGFR have been shown efficacy as antitumor target (Laskin, Cancer Treat. Review 30 (2004), 1-17). For example, cetuximab (Erbitux) a humanized monoclonal antibody to EGFR, which competitively inhibits the extracellular domain of EGFR to inhibit ligand activation of the receptor, was approved by the Food and Drug Administration (FDA) in 2004 for the treatment of metastatic colon cancer in combination with the topoisomerase inhibitor irinotecan.

[0108] In a preferred embodiment of the invention the polypeptide is a bispecific single chain antibody molecule.

[0109] The herein above described problems with regard to the development of surrogate molecules for preclinical studies is further aggravated, if the drug candidate is a bispecific antibody, e.g. a bispecific single chain antibody. Such a bispecific antibody requires that both antigens recognized are cross-species specific with a given animal species to allow for safety testing in such animal.

[0110] As also noted herein above, the present invention provides polypeptides comprising a first binding domain capable of binding to an epitope of human and non-chimpanzee primate CD3ε chain and a second binding domain capable of binding to a cell surface antigen selected from EGFR, Her2/neu or IgE, wherein the second binding domain preferably also binds to a cell surface antigen of a human and/or a non-chimpanzee primate. The advantage of bispecific single chain antibody molecules as drug candidates fulfilling the requirements of the preferred polypeptide of the invention is the use of such molecules in preclinical animal testing as well as in clinical studies and even for therapy in human. In a preferred embodiment of the cross-species specific bispecific single chain antibodies of the invention the second binding domain capable of binding to a cell surface antigen is of human origin. In a cross-species specific bispecific molecule according to the invention the binding domain capable of binding to an epitope of human and non-chimpanzee primate CD3 epsilon chain is located in the order VH-VL or VL-VH at the N-terminus or the C-terminus of the bispecific molecule. Examples for cross-species specific bispecific molecules according to the invention in different arrangements of the VH- and the VL-chain in the first and the second binding domain are described in the appended examples.

[0111] As used herein, a “bispecific single chain antibody” denotes a single polypeptide chain comprising two binding domains. Each binding domain comprises one variable region from an antibody heavy chain (“VH region”), wherein the VH region of the first binding domain specifically binds to the CD3ε molecule, and the VH region of the second binding domain specifically binds to a cell surface antigen, as defined in more detail below. The two binding domains are optionally linked to one another by a short polypeptide spacer. A non-limiting example for a polypeptide spacer is Gly-Gly-Gly-Gly-Ser (G-G-G-S) and repeats thereof. Each binding domain may additionally comprise one variable region from an antibody light chain (“VL region”), the VH region and VL region within each of the first and second binding domains being linked to one another via a polypeptide linker, for example of the type disclosed and claimed in EP 623679 B1, but in any case long enough to allow the VH region and VL region of the first binding domain and the VH region and VL region of the second binding domain to pair with one another such that, together, they are able to specifically bind to the respective first and second molecules.

[0112] According to a preferred embodiment of the invention an above characterized bispecific single chain antibody molecule comprises a group of the following sequences as CDR H1, CDR H2, CDR H3, CDR L1, CDR L2 and CDR L3 in the second binding domain selected from SEQ ID NO: 441-446, SEQ ID NO: 453-458, SEQ ID NO: 463-468, SEQ ID NO: 481-486.

[0113] A particularly preferred embodiment of the invention concerns an above characterized polypeptide, wherein the bispecific single chain antibody molecule comprises a sequence selected from:
[0114] (a) an amino acid sequence as depicted in any of SEQ ID NOs:389, 391, 393, 395, 397, 399, 409, 411, 413, 415, 417, 419, 429, 431, 433, 435, 437, 439, 447, 449, 451, 469, 471, 473, 475, 477, 479, 495, 497, 499, 501, 503 and 505; and
[0115] (b) an amino acid sequence encoded by a nucleic acid sequence as depicted in any of SEQ ID NOs: 390, 392, 394, 396, 398, 400, 410, 412, 414, 416, 418, 420, 430, 432, 434, 436, 438, 440, 448, 450, 452, 470, 472, 474, 476, 478, 480, 496, 498, 500, 502, 504 and 506.

[0116] In a preferred embodiment of the invention, the bispecific single chain antibodies are cross-species specific for CD3 epsilon and for the tumor antigen recognized by their second binding domain.

[0117] In an alternative embodiment the present invention provides a nucleic acid sequence encoding an above described polypeptide of the invention.

[0118] The present invention also relates to a vector comprising the nucleic acid molecule of the present invention.

[0119] Many suitable vectors are known to those skilled in molecular biology, the choice of which would depend on the function desired and include plasmids, cosmids, viruses, bacteriophages and other vectors used conventionally in genetic engineering. Methods which are well known to those skilled in the art can be used to construct various plasmids and vectors; see, for example, the techniques described in Sambrook et al. (loc cit.) and Ausubel, Current Protocols in Molecular Biology, Green Publishing Associates and Wiley Interscience, N.Y. (1989), (1994). Alternatively, the polynucleotides and vectors of the invention can be reconstituted into liposomes for delivery to target cells. As discussed in further details below, a cloning vector was used to isolate individual sequences of DNA. Relevant sequences can be transferred into expression vectors where expression of a particular polypeptide is required. Typical cloning vectors include pBluescript SK, pGEM, pUC9, pBR322 and pGBT9. Typical expression vectors include pTRE, pCAL-n-EK, pESP-1, pOP13CAT.

[0120] Preferably said vector comprises a nucleic acid sequence which is a regulatory sequence operably linked to said nucleic acid sequence defined herein.

[0121] The term “regulatory sequence” refers to DNA sequences, which are necessary to effect the expression of coding sequences to which they are ligated. The nature of such control sequences differs depending upon the host organism. In prokaryotes, control sequences generally include promoter, ribosomal binding site, and terminators. In eukaryotes generally control sequences include promoters, terminators and, in some instances, enhancers, transactivators or transcription factors. The term “control sequence” is intended to include, at a minimum, all components the presence of which are necessary for expression, and may also include additional advantageous components.

[0122] The term “operably linked” refers to a juxtaposition wherein the components so described are in a relationship permitting them to function in their intended manner. A control sequence “operably linked” to a coding sequence is ligated in such a way that expression of the coding sequence is achieved under conditions compatible with the control sequences. In case the control sequence is a promoter, it is obvious for a skilled person that double-stranded nucleic acid is preferably used.

[0123] Thus, the recited vector is preferably an expression vector. An “expression vector” is a construct that can be used to transform a selected host and provides for expression of a coding sequence in the selected host. Expression vectors can for instance be cloning vectors, binary vectors or integrating vectors. Expression comprises transcription of the nucleic acid molecule preferably into a translatable mRNA. Regulatory elements ensuring expression in prokaryotes and/or eukaryotic cells are well known to those skilled in the art. In the case of eukaryotic cells they comprise normally promoters ensuring initiation of transcription and optionally poly-A signals ensuring termination of transcription and stabilization of the transcript. Possible regulatory elements permitting expression in prokaryotic host cells comprise, e.g., the P_{L}, lac, trp or tac promoter in E. coli, and examples of regulatory elements permitting expression in eukaryotic host cells are the AOX1 or GAL1 promoter in yeast or the CMV-, SV40-, RSV-promoter (Rous sarcoma virus), CMV-enhancer, SV40-enhancer or a globin intron in mammalian and other animal cells.

[0124] Beside elements, which are responsible for the initiation of transcription such regulatory elements may also comprise transcription termination signals, such as the SV40-poly-A site or the tk-poly-A site, downstream of the polynucleotide.

[0125] Furthermore, depending on the expression system used leader sequences capable of directing the polypeptide to a cellular compartment or secreting it into the medium may be added to the coding sequence of the recited nucleic acid sequence and are well known in the art; see also the appended Examples. The leader sequence(s) is (are) assembled in appropriate phase with translation, initiation and termination sequences, and preferably, a leader sequence capable of directing secretion of translated protein, or a portion thereof, into the periplasmic space or extracellular medium. Optionally, the heterologous sequence can encode a fusion protein including an N-terminal identification peptide imparting desired characteristics, e.g., stabilization or simplified purification of expressed recombinant product; see supra. In this context, suitable expression vectors are known in the art such as Okayama-Berg cDNA expression vector pcDV1 (Pharmacia), pCDM8, pRc/CMV, pcDNA1, pcDNA3 (In-vitrogene), pEF-DHFR, pEF-ADA or pEF-neo (Mack et al. PNAS (1995) 92, 7021-7025 and Raum et al. Cancer Immunol Immunother (2001) 50(3), 141-150) or pSPORT1 (GIBCO BRL).

[0126] Preferably, the expression control sequences will be eukaryotic promoter systems in vectors capable of transforming of transfecting eukaryotic host cells, but control sequences for prokaryotic hosts may also be used. Once the vector has been incorporated into the appropriate host, the host is maintained under conditions suitable for high level expression of the nucleotide sequences, and as desired, the collection and purification of the polypeptide of the invention may follow; see, e.g., the appended examples.

[0127] An alternative expression system, which can be used to express a cell cycle interacting protein is an insect system. In one such system, Autographa californica nuclear polyhedrosis virus (AcNPV) is used as a vector to express foreign genes in Spodoptera frugiperda cells or in Trichoplusia larvae. The coding sequence of a recited nucleic acid molecule may be cloned into a nonessential region of the virus, such as the polyhedrin gene, and placed under control of the polyhedrin promoter. Successful insertion of said coding sequence will render the polyhedrin gene inactive and produce recombinant virus lacking coat protein coat. The recombinant viruses are then used to infect S. frugiperda cells or Trichoplusia larvae in which the protein of the invention is expressed (Smith, J. Virol. 46 (1983), 584; Engelhard, Proc. Nat. Acad. Sci. USA 91 (1994), 3224-3227).

[0128] Additional regulatory elements may include transcriptional as well as translational enhancers. Advantageously, the above-described vectors of the invention comprise a selectable and/or scorable marker.

[0129] Selectable marker genes useful for the selection of transformed cells and, e.g., plant tissue and plants are well known to those skilled in the art and comprise, for example, antimetabolite resistance as the basis of selection for dhfr, which confers resistance to methotrexate (Reiss, Plant Physiol. (Life Sci. Adv.) 13 (1994), 143-149); npt, which confers resistance to the aminoglycosides neomycin, kanamycin and paromycin (Herrera-Estrella, EMBO J. 2 (1983), 987-995) and hygro, which confers resistance to hygromycin (Marsh, Gene 32 (1984), 481-485). Additional selectable genes have been described, namely trpB, which allows cells to utilize indole in place of tryptophan; hisD, which allows cells to utilize histinol in place of histidine (Hartman, Proc. Natl. Acad. Sci. USA 85 (1988), 8047); mannose-6-phosphate isomerase which allows cells to utilize mannose (WO 94/20627) and ODC (ornithine decarboxylase) which confers resistance to the ornithine decarboxylase inhibitor, 2-(difluoromethyl)-DL-ornithine, DFMO (McConlogue, 1987, In: Current Communications in Molecular Biology, Cold Spring Harbor Laboratory ed.) or deaminase from Aspergillus terreus which confers resistance to Blasticidin S (Tamura, Biosci. Biotechnol. Biochem. 59 (1995), 2336-2338).

[0130] Useful scorable markers are also known to those skilled in the art and are commercially available. Advantageously, said marker is a gene encoding luciferase (Giacomin, Pl. Sci. 116 (1996), 59-72; Scikantha, J. Bact. 178 (1996), 121), green fluorescent protein (Gerdes, FEBS Lett. 389 (1996), 44-47) or β-glucuronidase (Jefferson, EMBO J. 6 (1987), 3901-3907). This embodiment is particularly useful for simple and rapid screening of cells, tissues and organisms containing a recited vector.

[0131] As described above, the recited nucleic acid molecule can be used alone or as part of a vector to express the polypeptide of the invention in cells, for, e.g., purification but also for gene therapy purposes. The nucleic acid molecules or vectors containing the DNA sequence(s) encoding any one of the above described polypeptide of the invention is introduced into the cells which in turn produce the polypeptide of interest. Gene therapy, which is based on introducing therapeutic genes into cells by ex-vivo or in-vivo techniques is one of the most important applications of gene transfer. Suitable vectors, methods or gene-delivery systems for in-vitro or in-vivo gene therapy are described in the literature and are known to the person skilled in the art; see, e.g., Giordano, Nature Medicine 2 (1996), 534-539; Schaper, Circ. Res. 79 (1996), 911-919; Anderson, Science 256 (1992), 808-813; Verma, Nature 389 (1994), 239; Isner, Lancet 348 (1996), 370-374; Muhlhauser, Circ. Res. 77 (1995), 1077-1086; Onodera, Blood 91 (1998), 30-36; Verma, Gene Ther. 5 (1998), 692-699; Nabel, Ann. N.Y. Acad. Sci. 811 (1997), 289-292; Verzeletti, Hum. Gene Ther. 9 (1998), 2243-51; Wang, Nature Medicine 2 (1996), 714-716; WO 94/29469; WO 97/00957, U.S. Pat. No. 5,580,859; U.S. Pat. No. 5,589,466; or Schaper, Current Opinion in Biotechnology 7 (1996), 635-640. The recited nucleic acid molecules and vectors may be designed for direct introduction or for introduction via liposomes, or viral vectors (e.g., adenoviral, retroviral) into the cell. Preferably, said cell is a germ line cell, embryonic cell, or egg cell or derived there from, most preferably said cell is a stem cell. An example for an embryonic stem cell can be, inter alia, a stem cell as described in Nagy, Proc. Natl. Acad. Sci. USA 90 (1993), 8424-8428.

[0132] The invention also provides for a host transformed or transfected with a vector of the invention. Said host may be produced by introducing the above described vector of the invention or the above described nucleic acid molecule of the invention into the host. The presence of at least one vector or at least one nucleic acid molecule in the host may mediate the expression of a gene encoding the above described single chain antibody constructs.

[0133] The described nucleic acid molecule or vector of the invention, which is introduced in the host may either integrate into the genome of the host or it may be maintained extrachromosomally.

[0134] The host can be any prokaryote or eukaryotic cell.

[0135] The term “prokaryote” is meant to include all bacteria, which can be transformed or transfected with DNA or RNA molecules for the expression of a protein of the invention. Prokaryotic hosts may include gram negative as well as gram positive bacteria such as, for example, E. coli, S. typhimurium, Serratia marcescens and Bacillus subtilis. The term “eukaryotic” is meant to include yeast, higher plant, insect and preferably mammalian cells. Depending upon the host employed in a recombinant production procedure, the protein encoded by the polynucleotide of the present invention may be glycosylated or may be non-glycosylated. Especially preferred is the use of a plasmid or a virus containing the coding sequence of the polypeptide of the invention and genetically fused thereto an N-terminal FLAG-tag and/or C-terminal His-tag. Preferably, the length of said FLAG-tag is about 4 to 8 amino acids, most preferably 8 amino acids. An above described polynucleotide can be used to transform or transfect the host using any of the techniques commonly known to those of ordinary skill in the art. Furthermore, methods for preparing fused, operably linked genes and expressing them in, e.g., mammalian cells and bacteria are well-known in the art (Sambrook, loc cit.).

[0136] Preferably, said the host is a bacterium or an insect, fungal, plant or animal cell.

[0137] It is particularly envisaged that the recited host may be a mammalian cell. Particularly preferred host cells comprise CHO cells, COS cells, myeloma cell lines like SP2/0 or NS/0. As illustrated in the appended examples, particularly preferred are CHO-cells as hosts.

[0138] More preferably said host cell is a human cell or human cell line, e.g. per.c6 (Kroos, Biotechnol. Prog., 2003, 19:163-168).

[0139] In a further embodiment, the present invention thus relates to a process for the production of a polypeptide of the invention, said process comprising culturing a host of the invention under conditions allowing the expression of the polypeptide of the invention and recovering the produced polypeptide from the culture.

[0140] The transformed hosts can be grown in fermentors and cultured according to techniques known in the art to achieve optimal cell growth. The polypeptide of the invention can then be isolated from the growth medium, cellular lysates, or cellular membrane fractions. The isolation and purification of the, e.g., microbially expressed polypeptides of the invention may be by any conventional means such as, for example, preparative chromatographic separations and immunological separations such as those involving the use of monoclonal or polyclonal antibodies directed, e.g., against a tag of the polypeptide of the invention or as described in the appended examples.

[0141] The conditions for the culturing of a host, which allow the expression are known in the art to depend on the host system and the expression system/vector used in such process. The parameters to be modified in order to achieve conditions allowing the expression of a recombinant polypeptide are known in the art. Thus, suitable conditions can be determined by the person skilled in the art in the absence of further inventive input.

[0142] Once expressed, the polypeptide of the invention can be purified according to standard procedures of the art, including ammonium sulfate precipitation, affinity columns, column chromatography, gel electrophoresis and the like; see, Scopes, “Protein Purification”, Springer-Verlag, N.Y. (1982). Substantially pure polypeptides of at least about 90 to 95% homogeneity are preferred, and 98 to 99% or more homogeneity are most preferred, for pharmaceutical uses. Once purified, partially or to homogeneity as desired, the polypeptide of the invention may then be used therapeutically (including extracorporeally) or in developing and performing assay procedures. Furthermore, examples for methods for the recovery of the polypeptide of the invention from a culture are described in detail in the appended examples.

[0143] Furthermore, the invention provides for a composition comprising a polypeptide of the invention or a polypeptide as produced by the process disclosed above. Preferably, said composition is a pharmaceutical composition.

[0144] In accordance with the invention, the term “pharmaceutical composition” relates to a composition for administration to a patient, preferably a human patient. The particular preferred pharmaceutical composition of this invention comprises binding molecules directed against and generated against context-independent CD3 epitopes. Preferably, the pharmaceutical composition comprises suitable formulations of carriers, stabilizers and/or excipients. In a preferred embodiment, the pharmaceutical composition comprises a composition for parenteral, transdermal, intraluminal, intraarterial, intrathecal and/or intranasal administration or by direct injection into tissue. It is in particular envisaged that said composition is administered to a patient via infusion or injection. Administration of the suitable compositions may be effected by different ways, e.g., by intravenous, intraperitoneal, subcutaneous, intramuscular, topical or intradermal administration. In particular, the present invention provides for an uninterrupted administration of the suitable composition. As a non-limiting example, uninterrupted, i.e. continuous administration may be realized by a small pump system worn by the patient for metering the influx of therapeutic agent into the body of the patient. The pharmaceutical composition comprising the binding molecules directed against and generated against context-independent CD3 epitopes of the invention can be administered by using said pump systems. Such pump systems are generally known in the art, and commonly rely on periodic exchange of cartridges containing the therapeutic agent to be infused. When exchanging the cartridge in such a pump system, a temporary interruption of the otherwise uninterrupted flow of therapeutic agent into the body of the patient may ensue. In such a case, the phase of administration prior to cartridge replacement and the phase of administration following cartridge replacement would still be considered within the meaning of the pharmaceutical means and methods of the invention together make up one “uninterrupted administration” of such therapeutic agent.

[0145] The continuous or uninterrupted administration of these binding molecules directed against and generated against context-independent CD3 epitopes of this invention may be intravenuous or subcutaneous by way of a fluid delivery device or small pump system including a fluid driving mechanism for driving fluid out of a reservoir and an actuating mechanism for actuating the driving mechanism. Pump systems for subcutaneous administration may include a needle or a cannula for penetrating the skin of a patient and delivering the suitable composition into the patient's body. Said pump systems may be directly fixed or attached to the skin of the patient independently of a vein, artery or blood vessel, thereby allowing a direct contact between the pump system and the skin of the patient. The pump system can be attached to the skin of the patient for 24 hours up to several days. The pump system may be of small size with a reservoir for small volumes. As a non-limiting example, the volume of the reservoir for the suitable pharmaceutical composition to be administered can be between 0.1 and 50 ml.

[0146] The continuous administration may be transdermal by way of a patch worn on the skin and replaced at intervals. One of skill in the art is aware of patch systems for drug delivery suitable for this purpose. It is of note that transdermal administration is especially amenable to uninterrupted administration, as exchange of a first exhausted patch can advantageously be accomplished simultaneously with the placement of a new, second patch, for example on the surface of the skin immediately adjacent to the first exhausted patch and immediately prior to removal of the first exhausted patch. Issues of flow interruption or power cell failure do not arise.

[0147] The composition of the present invention, comprising in particular binding molecules directed against and generated against context-independent CD3 epitopes may further comprise a pharmaceutically acceptable carrier. Examples of suitable pharmaceutical carriers are well known in the art and include solutions, e.g. phosphate buffered saline solutions, water, emulsions, such as oil/water emulsions, various types of wetting agents, sterile solutions, liposomes, etc. Compositions comprising such carriers can be formulated by well known conventional methods. Formulations can comprise carbohydrates, buffer solutions, amino acids and/or surfactants. Carbohydrates may be non-reducing sugars, preferably trehalose, sucrose, octasulfate, sorbitol or xylitol. Such formulations may be used for continuous administrations which may be intravenuous or subcutaneous with and/or without pump systems. Amino acids may be charged amino acids, preferably lysine, lysine acetate, arginine, glutamate and/or histidine. Surfactants may be detergents, preferably with a molecular weight of >1.2 KD and/or a polyether, preferably with a molecular weight of >3 KD. Non-limiting examples for preferred detergents are Tween 20, Tween 40, Tween 60, Tween 80 or Tween 85. Non-limiting examples for preferred polyethers are PEG 3000, PEG 3350, PEG 4000 or PEG 5000. Buffer systems used in the present invention can have a preferred pH of 5-9 and may comprise citrate, succinate, phosphate, histidine and acetate. The compositions of the present invention can be administered to the subject at a suitable dose which can be determined e.g. by dose escalating studies by administration of increasing doses of the polypeptide of the invention exhibiting cross-species specificity described herein to non-chimpanzee primates, for instance macaques. As set forth above, the polypeptide of the invention exhibiting cross-species specificity described herein can be advantageously used in identical form in preclinical testing in non-chimpanzee primates and as drug in humans. These compositions can also be administered in combination with other proteinaceous and non-proteinaceous drugs. These drugs may be administered simultaneously with the composition comprising the polypeptide of the invention as defined herein or separately before or after administration of said polypeptide in timely defined intervals and doses. The dosage regimen will be determined by the attending physician and clinical factors. As is well known in the medical arts, dosages for any one patient depend upon many factors, including the patient's size, body surface area, age, the particular compound to be administered, sex, time and route of administration, general health, and other drugs being administered concurrently. Preparations for parenteral administration include sterile aqueous or non-aqueous solutions, suspensions, and emulsions. Examples of non-aqueous solvents are propylene glycol, polyethylene glycol, vegetable oils such as olive oil, and injectable organic esters such as ethyl oleate. Aqueous carriers include water, alcoholic/aqueous solutions, emulsions or suspensions, including saline and buffered media. Parenteral vehicles include sodium chloride solution, Ringer's dextrose, dextrose and sodium chloride, lactated Ringer's, or fixed oils. Intravenous vehicles include fluid and nutrient replenishers, electrolyte replenishers (such as those based on Ringer's dextrose), and the like. Preservatives and other additives may also be present such as, for example, antimicrobials, anti-oxidants, chelating agents, inert gases and the like. In addition, the composition of the present invention might comprise proteinaceous carriers, like, e.g., serum albumin or immunoglobulin, preferably of human origin. It is envisaged that the composition of the invention might comprise, in addition to the polypeptide of the invention defined herein, further biologically active agents, depending on the intended use of the composition. Such agents might be drugs acting on the gastro-intestinal system, drugs acting as cytostatica, drugs preventing hyperurikemia, drugs inhibiting immunoreactions (e.g. corticosteroids), drugs modulating the inflammatory response, drugs acting on the circulatory system and/or agents such as cytokines known in the art.

[0148] The biological activity of the pharmaceutical composition defined herein can be determined for instance by cytotoxicity assays, as described in the following examples, in WO 99/54440 or by Schlereth et al. (Cancer Immunol. Immunother. 20 (2005), 1-12). “Efficacy” or “in vivo efficacy” as used herein refers to the response to therapy by the pharmaceutical composition of the invention, using e.g. standardized NCl response criteria. The success or in vivo efficacy of the therapy using a pharmaceutical composition of the invention refers to the effectiveness of the composition for its intended purpose, i.e. the ability of the composition to cause its desired effect, i.e. depletion of pathologic cells, e.g. tumor cells. The in vivo efficacy may be monitored by established standard methods for the respective disease entities including, but not limited to white blood cell counts, differentials, Fluorescence Activated Cell Sorting, bone marrow aspiration. In addition, various disease specific clinical chemistry parameters and other established standard methods may be used. Furthermore, computer-aided tomography, X-ray, nuclear magnetic resonance tomography (e.g. for National Cancer Institute-criteria based response assessment [Cheson B D, Horning S J, Coiffier B, Shipp M A, Fisher R I, Connors J M, Lister T A, Vose J, Grillo-Lopez A, Hagenbeek A, Cabanillas F, Klippensten D, Hiddemann W, Castellino R, Harris N L, Armitage J O, Carter W, Hoppe R, Canellos G P. Report of an international workshop to standardize response criteria for non-Hodgkin's lymphomas. NCl Sponsored International Working Group. J Clin Oncol. 1999 April; 17(4):1244]), positron-emission tomography scanning, white blood cell counts, differentials, Fluorescence Activated Cell Sorting, bone marrow aspiration, lymph node biopsies/histologies, and various lymphoma specific clinical chemistry parameters (e.g. lactate dehydrogenase) and other established standard methods may be used.

[0149] Another major challenge in the development of drugs such as the pharmaceutical composition of the invention is the predictable modulation of pharmacokinetic properties. To this end, a pharmacokinetic profile of the drug candidate, i.e. a profile of the pharmacokinetic parameters that effect the ability of a particular drug to treat a given condition, is established. Pharmacokinetic parameters of the drug influencing the ability of a drug for treating a certain disease entity include, but are not limited to: half-life, volume of distribution, hepatic first-pass metabolism and the degree of blood serum binding. The efficacy of a given drug agent can be influenced by each of the parameters mentioned above.

[0150] “Half-life” means the time where 50% of an administered drug are eliminated through biological processes, e.g. metabolism, excretion, etc.

[0151] By “hepatic first-pass metabolism” is meant the propensity of a drug to be metabolized upon first contact with the liver, i.e. during its first pass through the liver. “Volume of distribution” means the degree of retention of a drug throughout the various compartments of the body, like e.g. intracellular and extracellular spaces, tissues and organs, etc. and the distribution of the drug within these compartments. “Degree of blood serum binding” means the propensity of a drug to interact with and bind to blood serum proteins, such as albumin, leading to a reduction or loss of biological activity of the drug.

[0152] Pharmacokinetic parameters also include bioavailability, lag time (Tlag), Tmax, absorption rates, more onset and/or Cmaxfor a given amount of drug administered.

[0153] “Bioavailability” means the amount of a drug in the blood compartment.

[0154] “Lag time” means the time delay between the administration of the drug and its detection and measurability in blood or plasma.

[0155] “Tmax” is the time after which maximal blood concentration of the drug is reached, and “Cmax” is the blood concentration maximally obtained with a given drug. The time to reach a blood or tissue concentration of the drug which is required for its biological effect is influenced by all parameters. Pharmacokinetik parameters of bispecific single chain antibodies, a preferred embodiment of the polypeptide of the invention, exhibiting cross-species specificity, which may be determined in preclinical animal testing in non-chimpanzee primates as outlined above are also set forth e.g. in the publication by Schlereth et al. (Cancer Immunol. Immunother. 20 (2005), 1-12).

[0156] The term “toxicity” as used herein refers to the toxic effects of a drug manifested in adverse events or severe adverse events. These side events might refer to a lack of tolerability of the drug in general and/or a lack of local tolerance after administration. Toxicity could also include teratogenic or carcinogenic effects caused by the drug.

[0157] The term “safety”, “in vivo safety” or “tolerability” as used herein defines the administration of a drug without inducing severe adverse events directly after administration (local tolerance) and during a longer period of application of the drug. “Safety”, “in vivo safety” or “tolerability” can be evaluated e.g. at regular intervals during the treatment and follow-up period. Measurements include clinical evaluation, e.g. organ manifestations, and screening of laboratory-abnormalities. Clinical evaluation may be carried out and deviating to normal findings recorded/coded according to NCl-CTC and/or MedDRA standards. Organ manifestations may include criteria such as allergy/immunology, blood/bone marrow, cardiac arrhythmia, coagulation and the like, as set forth e.g. in the Common Terminology Criteria for adverse events v3.0 (CTCAE). Laboratory parameters which may be tested include for instance haematology, clinical chemistry, coagulation profile and urine analysis and examination of other body fluids such as serum, plasma, lymphoid or spinal fluid, liquor and the like. Safety can thus be assessed e.g. by physical examination, imaging techniques (i.e. ultrasound, x-ray, CT scans, Magnetic Resonance Imaging (MRI), other measures with technical devices (i.e. electrocardiogram), vital signs, by measuring laboratory parameters and recording adverse events. For example, adverse events in non-chimpanzee primates in the uses and methods according to the invention may be examined by histopathological and/or histochemical methods.

[0158] The term “effective and non-toxic dose” as used herein refers to a tolerable dose of the bispecific single chain antibody as defined herein which is high enough to cause depletion of pathologic cells, tumor elimination, tumor shrinkage or stabilization of disease without or essentially without major toxic effects. Such effective and non-toxic doses may be determined e.g. by dose escalation studies described in the art and should be below the dose inducing severe adverse side events (dose limiting toxicity, DLT).

[0159] The above terms are also referred to e.g. in the Preclinical safety evaluation of biotechnology-derived pharmaceuticals S6; ICH Harmonised Tripartite Guideline; ICH Steering Committee meeting on Jul. 16, 1997.

[0160] Moreover, the invention relates to a pharmaceutical composition comprising a polypeptide of this invention (i.e. a polypeptide comprising at least one binding domain capable of binding to an epitope of human and non-chimpanzee primate CD3 epsilon chain, wherein the epitope is part of an amino acid sequence comprised in the group consisting of SEQ ID NOs. 2, 4, 6, or 8 in accordance with this invention or produced according to the process according to the invention) for the prevention, treatment or amelioration of a disease selected from a proliferative disease, a tumorous disease, or an immunological disorder. Preferably, said pharmaceutical composition further comprises suitable formulations of carriers, stabilizers and/or excipients.

[0161] A further aspect of the invention relates to a use of a polypeptide as defined herein above or produced according to a process defined herein above, for the preparation of a pharmaceutical composition for the prevention, treatment or amelioration of a disease. Preferably, said disease is a proliferative disease, a tumorous disease, or an immunological disorder. It is further preferred that said tumorous disease is a malignant disease, preferably cancer.

[0162] In another preferred embodiment of use of the polypeptide of the invention said pharmaceutical composition is suitable to be administered in combination with an additional drug, i.e. as part of a co-therapy. In said co-therapy, an active agent may be optionally included in the same pharmaceutical composition as the polypeptide of the invention, or may be included in a separate pharmaceutical composition. In this latter case, said separate pharmaceutical composition is suitable for administration prior to, simultaneously as or following administration of said pharmaceutical composition comprising the polypeptide of the invention. The additional drug or pharmaceutical composition may be a non-proteinaceous compound or a proteinaceous compound. In the case that the additional drug is a proteinaceous compound, it is advantageous that the proteinaceous compound be capable of providing an activation signal for immune effector cells.

[0163] Preferably, said proteinaceous compound or non-proteinaceous compound may be administered simultaneously or non-simultaneously with the polypeptide of the invention, a nucleic acid molecule as defined hereinabove, a vector as defined as defined hereinabove, or a host as defined as defined hereinabove.

[0164] Another aspect of the invention relates to a method for the prevention, treatment or amelioration of a disease in a subject in the need thereof, said method comprising the step of administration of an effective amount of a pharmaceutical composition of the invention. Preferably, said disease is a proliferative disease, a tumorous disease, or an immunological disorder. Even more preferred, said tumorous disease is a malignant disease, preferably cancer.

[0165] In another preferred embodiment of the method of the invention said pharmaceutical composition is suitable to be administered in combination with an additional drug, i.e. as part of a co-therapy. In said co-therapy, an active agent may be optionally included in the same pharmaceutical composition as the polypeptide of the invention, or may be included in a separate pharmaceutical composition. In this latter case, said separate pharmaceutical composition is suitable for administration prior to, simultaneously as or following administration of said pharmaceutical composition comprising the polypeptide of the invention. The additional drug or pharmaceutical composition may be a non-proteinaceous compound or a proteinaceous compound. In the case that the additional drug is a proteinaceous compound, it is advantageous that the proteinaceous compound be capable of providing an activation signal for immune effector cells.

[0166] Preferably, said proteinaceous compound or non-proteinaceous compound may be administered simultaneously or non-simultaneously with the polypeptide of the invention, a nucleic acid molecule as defined hereinabove, a vector as defined as defined hereinabove, or a host as defined as defined hereinabove.

[0167] It is preferred for the above described method of the invention that said subject is a human.

[0168] In a further aspect, the invention relates to a kit comprising a polypeptide of the invention, a nucleic acid molecule of the invention, a vector of the invention, or a host of the invention.

[0169] The present invention is further characterized by the following list of items:

[0170] Item 1. A method for the identification of (a) polypeptide(s) comprising a cross-species specific binding domain capable of binding to an epitope of human and non-chimpanzee primate CD3 epsilon (CD3ε), the method comprising the steps of:

[0171] (a) contacting the polypeptide(s) with an N-terminal fragment of the extracellular domain of CD38 of maximal 27 amino acids comprising the amino acid sequence Gln-Asp-Gly-Asn-Glu-Glu-Met-Gly (SEQ ID NO. 381) or Gln-Asp-Gly-Asn-Glu-Glu-Ile-Gly (SEQ ID NO. 382), fixed via its C-terminus to a solid phase;

[0172] (b) eluting the bound polypeptide(s) from said fragment; and

[0173] (c) isolating the polypeptide(s) from the eluate of (b).

[0174] It is preferred that the polypeptide(s) identified by the above method of the invention are of human origin.

[0175] The present “method for the identification of (a) polypeptide(s)” is understood as a method for the isolation of one or more different polypeptides with the same specificity for the fragment of the extracellular domain of CD36 comprising at its N-terminus the amino acid sequence Gln-Asp-Gly-Asn-Glu-Glu-Met-Gly (SEQ ID NO. 381) or Gln-Asp-Gly-Asn-Glu-Glu-Ile-Gly (SEQ ID NO. 382) from a plurality of polypeptide candidates as well as a method for the purification of a polypeptide from a solution. Non-limiting embodiments of a method of the isolation of one or more different polypeptides with the same specificity for the fragment of the extracellular domain of CD3ε comprise methods for the selection of antigen-specific binding entities, e.g. panning methods as commonly used for hybridoma screening, screening of transiently/stably transfected clones of eukaryotic host cells or in phage display methods. A non-limiting example for the latter method for the purification of a polypeptide from a solution is e.g. the purification of a recombinantly expressed polypeptide from a culture supernatant or a preparation from such culture.

[0176] As stated above the fragment used in the method of the invention is a N-terminal fragment of the extracellular domain of the primate CD3ε molecule. The amino acid sequence of the extracellular domain of the CD3ε molecule of different primates is depicted in SEQ ID NOs: 1, 3, 5 and 7. The two forms of the N-terminal octamer are depicted in SEQ ID NOs: 381 and 382. It is preferred that this N-terminus is freely available for binding of the polypeptides to be identified by the method of the invention. The term “freely available” is understood in the context of the invention as free of additional motives such as a His-tag. The interference of such a His-tag with a binding molecule identified by the method of the invention is described in the appended Example 6.

[0177] According to the method of the invention said fragment is fixed via its C-terminus to a solid phase. The person skilled in the art will easily and without any inventive ado elect a suitable solid phase support dependent from the used embodiment of the method of the invention. Examples for a solid support comprise but are not limited to matrices like beads (e.g. agarose beads, sepharose beads, polystyrol beads, dextran beads), plates (culture plates or MultiWell plates) as well as chips known e.g. from Biacore®. The selection of the means and methods for the fixation/immobilization of the fragment to said solid support depend on the election of the solid support. A commonly used method for the fixation/immobilization is a coupling via an N-hydroxysuccinimide (NHS) ester. The chemistry underlying this coupling as well as alternative methods for the fixation/immobilization are known to the person skilled in the art, e.g. from Hermanson “Bioconjugate Techniques”, Academic Press, Inc. (1996). For the fixation to/immobilization on chromatographic supports the following means are commonly used: NHS-activated sepharose (e.g. HiTrap-NHS of GE Life Science—Amersham), CnBr-activated sepharose (e.g. GE Life Science—Amersham), NHS-activated dextran beads (Sigma) or activated polymethacrylate. These reagents may also be used in a batch approach. Moreover, dextran beads comprising iron oxide (e.g. available from Miltenyi) may be used in a batch approach. These beads may be used in combination with a magnet for the separation of the beads from a solution. Polypeptides can be immobilized on a Biacore chip (e.g. CM5 chips) by the use of NHS activated carboxymethyldextran. Further examples for an appropriate solid support are amine reactive MultiWell plates (e.g. Nunc Immobilizer™ plates).

[0178] According to the method of the invention said fragment of the extracellular domain of CD3 epsilon can be directly coupled to the solid support or via a stretch of amino acids, which might be a linker or another protein/polypeptide moiety. Alternatively, the extracellular domain of CD3 epsilon can be indirectly coupled via one or more adaptor molecule(s).

[0179] Means and methods for the eluation of a peptide bound to an immobilized epitope are well known in the art. The same holds true for methods for the isolation of the identified polypeptide(s) from the eluate.

[0180] In line with the invention a method for the isolation of one or more different polypeptides with the same specificity for the fragment of the extracellular domain of CD3ε comprising at its N-terminus the amino acid sequence Gln-Asp-Gly-Asn-Glu-Glu-X-Gly from a plurality of polypeptide candidates may comprise one or more steps of the following methods for the selection of antigen-specific entities:

[0181] CD3ε specific binding molecules can be selected from antibody derived repertoires. A phage display library can be constructed based on standard procedures, as for example disclosed in “Phage Display: A Laboratory Manual”; Ed. Barbas, Burton, Scott & Silverman; Cold Spring Harbor Laboratory Press, 2001. The format of the antibody fragments in the antibody library can be scFv, but may generally also be a Fab fragment or even a single domain antibody fragment. For the isolation of antibody fragments naïve antibody fragment libraries may be used. For the selection of potentially low immunogenic binding entities in later therapeutic use, human antibody fragment libraries may be favourable for the direct selection of human antibody fragments. In some cases they may form the basis for synthetic antibody libraries (Knappik et al. J Mol. Biol. 2000, 296:57 ff). The corresponding format may be Fab, scFv (as described below) or domain antibodies (dAbs, as reviewed in Holt et al., Trends Biotechnol. 2003, 21:484 ff).

[0182] It is also known in the art that in many cases there is no immune human antibody source available against the target antigen. Therefore animals are immunized with the target antigen and the respective antibody libraries isolated from animal tissue as e.g. spleen or PBMCs. The N-terminal fragment may be biotinylated or covalently linked to proteins like KLH or bovine serum albumin (BSA). According to common approaches rodents are used for immunization. Some immune antibody repertoires of non-human origin may be especially favourable for other reasons, e.g. for the presence of single domain antibodies (VHH) derived from cameloid species (as described in Muyldermans, J Biotechnol. 74:277; De Genst et al. Dev Como Immunol. 2006, 30:187 ff). Therefore a corresponding format of the antibody library may be Fab, scFv (as described below) or single domain antibodies (VHH).

[0183] In one possible approach ten weeks old F1 mice from balb/c×C57black crossings can be immunized with whole cells e.g. expressing transmembrane EpCAM N-terminally displaying as translational fusion the N-terminal amino acids 1 to 27 of the mature CD3ε chain. Alternatively, mice can be immunized with 1-27 CD3 epsilon-Fc fusion protein (a corresponding approach is described in the appended Example 2). After booster immunization(s), blood samples can be taken and antibody serum titer against the CD3-positive T cells can be tested e.g. in FACS analysis. Usually, serum titers are significantly higher in immunized than in non-immunized animals.

[0184] Immunized animals may form the basis for the construction of immune antibody libraries. Examples of such libraries comprise phage display libraries. Such libraries may be generally constructed based on standard procedures, as for example disclosed in “Phage Display: A Laboratory Manual”; Ed. Barbas, Burton, Scott & Silverman; Cold Spring Harbor Laboratory Press, 2001.

[0185] The non-human antibodies can also be humanized via phage display due to the generation of more variable antibody libraries that can be subsequently enriched for binders during selection.

[0186] In a phage display approach any one of the pools of phages that displays the antibody libraries forms a basis to select binding entities using the respective antigen as target molecule. The central step in which antigen specific, antigen bound phages are isolated is designated as panning. Due to the display of the antibody fragments on the surface of the phages, this general method is called phage display. One preferred method of selection is the use of small proteins such as the filamentous phage N2 domain translationally fused to the N-terminus of the scFv displayed by the phage. Another display method known in the art, which may be used to isolate binding entities is the ribosome display method (reviewed in Groves & Osbourn, Expert Opin Biol Ther. 2005, 5:125 ff; Lipovsek & Pluckthun, J Immunol Methods 2004, 290:52 ff).

[0187] In order to demonstrate binding of scFv phage particles to a 1-27 CD3ε-Fc fusion protein a phage library carrying the cloned scFv-repertoire can be harvested from the respective culture supernatant by PEG (polyethyleneglycole). ScFv phage particles may be incubated with immobilized CD3ε Fc fusion protein. The immobilized CD3ε Fc fusion protein may be coated to a solid phase. Binding entities can be eluted and the eluate can be used for infection of fresh uninfected bacterial hosts. Bacterial hosts successfully transduced with a phagemid copy, encoding a human scFv-fragment, can be selected again for carbenicillin resistance and subsequently infected with e.g. VCMS 13 helper phage to start the second round of antibody display and in vitro selection. A total of 4 to 5 rounds of selections is carried out, normally.

[0188] The binding of isolated binding entities can be tested on CD3epsilon positive Jurkat cells, HPBaII cells, PBMCs or transfected eukaryotic cells that carry the N-terminal CD3ε sequence fused to surface displayed EpCAM using a flow cytometric assay (see appended Example 4).

[0189] Item 2. The method of item 1, wherein the polypeptide(s) comprise(s) the identified binding domain as a first binding domain and a second binding domain capable of binding to a cell surface antigen.

[0190] For the generation of the second binding domain of the polypeptide identified by the method of the invention, e.g. bispecific single chain antibodies as defined herein, monoclonal antibodies binding to both of the respective human and non-chimpanzee primate cell surface antigens can be used. Appropriate binding domains for the bispecific polypeptide as defined herein e.g. can be derived from cross-species specific monoclonal antibodies by recombinant methods described in the art. A monoclonal antibody binding to a human cell surface antigen and to the homolog of said cell surface antigen in a non-chimpanzee primate can be tested by FACS assays as set forth above. Hybridoma techniques as described in the literature (Milstein and Köhler, Nature 256 (1975), 495-7) can also be used for the generation of cross-species specific antibodies. For example, mice may be alternately immunized with human and non-chimpanzee primate CD33. From these mice, cross-species specific antibody-producing hybridoma cells can be isolated via hybridoma technology and analysed by FACS as set forth above. The generation and analysis of bispecific polypeptides such as bispecific single chain antibodies exhibiting cross-species specificity as described herein is shown in the following Examples. The advantages of the bispecific single chain antibodies exhibiting cross-species specificity include the points enumerated below.

[0191] Item 3. The method of item 2, wherein the second binding domain binds to a cell surface antigen of a human and/or a non-chimpanzee primate.

[0192] Item 4. The method of any of items 1 to 3, wherein the first binding domain is an antibody.

[0193] Item 5. The method of item 4, wherein the antibody is a single chain antibody.

[0194] Item 6. The method of any of items 2 to 5, wherein the second binding domain is an antibody.

[0195] Item 7. The method of any of items 1 to 6, wherein the fragment of the extracellular domain of CD3ε consists of one or more fragments of a polypeptide having an amino acid sequence of any one depicted in SEQ ID NOs.2, 4, 6 or 8.

[0196] Item 8. The method of item 7, wherein said fragment is 8, 9, 10, 11, 12, 13, 14, 15, 16, 17, 18, 19, 20, 21, 22, 23, 24, 25, 26, 27 amino acid residues in length.

[0197] Item 9. The method of any of items 1 to 8, wherein the method of identification is a method of screening a plurality of polypeptides comprising a cross-species specific binding domain capable of binding to an epitope of human and non-chimpanzee primate CD3ε.

[0198] Item 10. The method of any of items 1 to 8, wherein the method of identification is a method of purification/isolation of a polypeptide comprising a cross-species specific binding domain capable of binding to an epitope of human and non-chimpanzee primate CD3ε.

[0199] Item 11. Use of an N-terminal fragment of the extracellular domain of CD3ε of maximal 27 amino acids comprising the amino acid sequence Gln-Asp-Gly-Asn-Glu-Glu-Met-Gly (SEQ ID NO. 381) or Gln-Asp-Gly-Asn-Glu-Glu-Ile-Gly (SEQ ID NO. 382) for the generation of a cross-species specific binding domain.

[0200] In line with said use of the invention it is preferred that the generated cross-species specific binding domain is of human origin.

[0201] Item 12. Use according to item 11, wherein the cross-species specific binding domain is an antibody.

[0202] Item 13. Use according to item 12, wherein the antibody is a single chain antibody.

[0203] Item 14. Use according to item 12 to 13, wherein the antibody is a bispecific antibody.

[0204] These and other embodiments are disclosed and encompassed by the description and Examples of the present invention. Recombinant techniques and methods in immunology are described e.g. in Sambrook et al. Molecular Cloning: A Laboratory Manual; Cold Spring Harbor Laboratory Press, 3^{rd} edition 2001; Lefkovits; Immunology Methods Manual; The Comprehensive Sourcebook of Techniques; Academic Press, 1997; Golemis; Protein-Protein Interactions: A Molecular Cloning Manual; Cold Spring Laboratory Press, 2002. Further literature concerning any one of the antibodies, methods, uses and compounds to be employed in accordance with the present invention may be retrieved from public libraries and databases, using for example electronic devices. For example, the public database “Medline”, available on the Internet, may be utilized, for example under http://www.ncbi.nlm.nih.gov/PubMed/medline.html. Further databases and addresses such as http://www.ncbi.nlm.nih.gov/ or listed at the EMBL-services homepage under http://www.embl.de/services/index.html are known to the person skilled in the art and can also be obtained using, e.g., http://www.google.com.

[0205] The figures show:

[0206] FIG. 1

[0207] Fusion of the N-terminal amino acids 1-27 of primate CD3 epsilon to a heterologous soluble protein.

[0208] FIG. 2

[0209] The figure shows the average absorption values of quadruplicate samples measured in an ELISA assay detecting the presence of a construct consisting of the N-terminal amino acids 1-27 of the mature human CD3 epsilon chain fused to the hinge and Fc gamma portion of human IgG1 and a C-terminal 6 Histidine tag in a supernatant of transiently transfected 293 cells. The first column labeled “27 aa huCD3E” shows the average absorption value for the construct, the second column labeled “irrel. SN” shows the average value for a supernatant of 293 cells transfected with an irrelevant construct as negative control. The comparison of the values obtained for the construct with the values obtained for the negative control clearly demonstrates the presence of the recombinant construct.

[0210] FIG. 3

[0211] The figure shows the average absorption values of quadruplicate samples measured in an ELISA assay detecting the binding of the cross species specific anti-CD3 binding molecules in form of crude preparations of periplasmatically expressed single-chain antibodies to a construct comprising the N-terminal 1-27 amino acids of the mature human CD3 epsilon chain fused to the hinge and Fc gamma portion of human IgG1 and a C-terminal His6 tag. The columns show from left to right the average absorption values for the specificities designated as A2J HLP, I2C HLP E2M HLP, F7O HLP, G4H HLP, H2C HLP, E1L HLP, F12Q HLP, F6A HLP and H1E HLP. The rightmost column labelled “neg. contr.” shows the average absorption value for the single-chain preparation of a murine anti-human CD3 antibody as negative control. The comparison of the values obtained for the anti-CD3 specificities with the values obtained for the negative control clearly demonstrates the strong binding of the anti-CD3 specificities to the N-terminal 1-27 amino acids of the mature human CD3 epsilon chain.

[0212] FIG. 4

[0213] Fusion of the N-terminal amino acids 1-27 of primate CD3 epsilon to a heterologous membrane bound protein.

[0214] FIG. 5

[0215] Histogram overlays of different transfectants tested in a FACS assay detecting the presence of recombinant transmembrane fusion proteins consisting of cynomolgus EpCAM and the N-terminal 1-27 amino acids of the human, marmoset, tamarin, squirrel monkey and domestic swine CD3 epsilon chain respectively. The histogram overlays from left to right and top to bottom show the results for the transfectants expressing the constructs comprising the human 27 mer, marmoset 27 mer, tamarin 27 mer, squirrel monkey 27 mer and swine 27 mer respectively. In the individual overlays the thin line represents a sample incubated with PBS with 2% FCS instead of anti-Flag M2 antibody as negative control and the bold line shows a sample incubated with the anti-Flag M2 antibody. For each construct the overlay of the histograms shows binding of the anti-Flag M2 antibody to the transfectants, which clearly demonstrates the expression of the recombinant constructs on the transfectants.

[0216] FIG. 6

[0217] Histogram overlays of different transfectants tested in a FACS assay detecting the binding of the cross-species specific anti-CD3 binding molecules in form of crude preparations of periplasmatically expressed single-chain antibodies to the N-terminal amino acids 1-27 of the human, marmoset, tamarin and squirrel monkey CD3 epsilon chain respectively fused to cynomolgus EpCAM.

[0218] FIG. 6A:

[0219] The histogram overlays from left to right and top to bottom show the results for the transfectants expressing the 1-27 CD3-EpCAM comprising the human 27 mer tested with the CD3 specific binding molecules designated H2C HLP, F12Q HLP, E2M HLP and G4H HLP respectively.

[0220] FIG. 6B:

[0221] The histogram overlays from left to right and top to bottom show the results for the transfectants expressing the 1-27 CD3-EpCAM comprising the marmoset 27 mer tested with the CD3 specific binding molecules designated H2C HLP, F12Q HLP, E2M HLP and G4H HLP respectively.

[0222] FIG. 6C:

[0223] The histogram overlays from left to right and top to bottom show the results for the transfectants expressing the 1-27 CD3-EpCAM comprising the tamarin 27 mer tested with the CD3 specific binding molecules designated H2C HLP, F12Q HLP, E2M HLP and G4H HLP respectively.

[0224] FIG. 6D:

[0225] The histogram overlays from left to right and top to bottom show the results for the transfectants expressing the 1-27 CD3-EpCAM comprising the squirrel monkey 27 mer tested with the CD3 specific binding molecules designated H2C HLP, F12Q HLP, E2M HLP and G4H HLP respectively.

[0226] FIG. 6E:

[0227] The histogram overlays from left to right and top to bottom show the results for the transfectants expressing the 1-27 CD3-EpCAM comprising the swine 27 mer tested with the CD3 specific binding molecules designated H2C HLP, F12Q HLP, E2M HLP and G4H HLP respectively.

[0228] In the individual overlays the thin line represents a sample incubated with a single-chain preparation of a murine anti-human CD3-antibody as negative control and the bold line shows a sample incubated with the respective anti-CD3 binding molecules indicated. Considering the lack of binding to the swine 27 mer transfectants and the expression levels of the constructs shown in FIG. 5 the overlays of the histograms show specific and strong binding of the tested anti-CD3 specificities of the fully cross-species specific human bispecific single chain antibodies to cells expressing the recombinant transmembrane fusion proteins comprising the N-terminal amino acids 1-27 of the human, marmoset, tamarin and squirrel monkey CD3 epsilon chain respectively fused to cynomolgus EpCAM and show therefore multi primate cross-species specificity of the anti-CD3 binding molecules.

[0229] FIG. 7

[0230] FACS assay for detection of human CD3 epsilon on transfected murine EL4 T cells. Graphical analysis shows an overlay of histograms. The bold line shows transfected cells incubated with the anti-human CD3 antibody UCHT-1. The thin line represents cells incubated with a mouse IgG1 isotype control. Binding of the anti CD3 antibody UCHT1 clearly shows expression of the human CD3 epsilon chain on the cell surface of transfected murine EL4 T cells.

[0231] FIG. 8

[0232] Binding of cross-species specific anti CD3 antibodies to alanine-mutants in an alanine scanning experiment. In the individual Figures the columns show from left to right the calculated binding values in arbitrary units in logarithmic scale for the wild-type transfectant (WT) and for all alanine-mutants from the position 1 to 27. The binding values are calculated using the following formula:

$$value\_Sample ( x , y ) = \frac{Sample ( x , y ) - neg\_Contr . ( x )}{\begin{matrix}( UCHT - 1 ( x ) - neg\_Contr . ( x ) ) * \\ \frac{WT ( y ) - neg\_Contr . ( wt )}{UCHT - 1 ( wt ) - neg\_Contr . ( wt )}\end{matrix}}$$

[0233] In this equation value_Sample means the value in arbitrary units of binding depicting the degree of binding of a specific anti-CD3 antibody to a specific alanine-mutant as shown in the Figure, Sample means the geometric mean fluorescence value obtained for a specific anti-CD3 antibody assayed on a specific alanine-scanning transfectant, neg_Contr. means the geometric mean fluorescence value obtained for the negative control assayed on a specific alanine-mutant, UCHT-1 means the geometric mean fluorescence value obtained for the UCHT-1 antibody assayed on a specific alanine-mutant, WT means the geometric mean fluorescence value obtained for a specific anti-CD3 antibody assayed on the wild-type transfectant, x specifies the respective transfectant, y specifies the respective anti-CD3 antibody and wt specifies that the respective transfectant is the wild-type. Individual alanine-mutant positions are labelled with the single letter code of the wild-type amino acid and the number of the position.

[0234] FIG. 8A:

[0235] The figure shows the results for cross-species specific anti CD3 antibody A2J HLP expressed as chimeric IgG molecule. Reduced binding activity is observed for mutations to alanine at position 4 (asparagine), at position 23 (threonine) and at position 25 (isoleucine). Complete loss of binding is observed for mutations to alanine at position 1 (glutamine), at position 2 (aspartate), at position 3 (glycine) and at position 5 (glutamate).

[0236] FIG. 8B:

[0237] The figure shows the results for cross-species specific anti CD3 antibody E2M HLP, expressed as chimeric IgG molecule. Reduced binding activity is observed for mutations to alanine at position 4 (asparagine), at position 23 (threonine) and at position 25 (isoleucine). Complete loss of binding is observed for mutations to alanine at position 1 (glutamine), at position 2 (aspartate), at position 3 (glycine) and at position 5 (glutamate).

[0238] FIG. 8C:

[0239] The figure shows the results for cross-species specific anti CD3 antibody H2C HLP, expressed as chimeric IgG molecule. Reduced binding activity is observed for mutations to alanine at position 4 (asparagine). Complete loss of binding is observed for mutations to alanine glutamine at position 1 (glutamine), at position 2 (aspartate), at position 3 (glycine) and at position 5 (glutamate).

[0240] FIG. 8D:

[0241] shows the results for cross-species specific anti CD3 antibody F12Q HLP, tested as periplasmatically expressed single-chain antibody. Complete loss of binding is observed for mutations to alanine at position 1 (glutamine), at position 2 (aspartate), at position 3 (glycine) and at position 5 (glutamate).

[0242] FIG. 9

[0243] FACS assay detecting the binding of the cross-species specific anti-CD3 binding molecule H2C HLP to human CD3 with and without N-terminal His6 tag.

[0244] Histogram overlays are performed of the EL4 cell line transfected with wild-type human CD3 epsilon chain (left histogram) or the human CD3 epsilon chain with N-terminal His 6 tag (right histogram) tested in a FACS assay detecting the binding of cross-species specific binding molecule H2C HLP. Samples are incubated with an appropriate isotype control as negative control (thin line), anti-human CD3 antibody UCHT-1 as positive control (dotted line) and cross-species specific anti-CD3 antibody H2C HLP in form of a chimeric IgG molecule (bold line).

[0245] Histogram overlays show comparable binding of the UCHT-1 antibody to both transfectants as compared to the isotype control demonstrating expression of both recombinant constructs. Histogram overlays also show binding of the anti-CD3 binding molecule H2C HLP only to the wild-type human CD3 epsilon chain but not to the His6-human CD3 epsilon chain. These results demonstrate that a free N-terminus is essential for binding of the cross-species specific anti-CD3 binding molecule H2C HLP.

[0246] FIG. 10

[0247] Saturation binding of EGFR-21-63 LH×H2C on human CD3 positive PBMC to determine the KD value of CD3 binding on cells by FACS analysis. The assay is performed as described in Example 7.

[0248] FIG. 11

[0249] FACS binding analysis of designated cross-species specific bispecific single chain constructs to CHO cells transfected with human EGFR, human CD3+ T cell line HPB-ALL, CHO cells transfected with cynomolgus EGFR and a macaque T cell line 4119 LnPx. The FACS staining is performed as described in Example 12. The thick line represents cells incubated with 2 μg/ml purified protein that are subsequently incubated with the anti-his antibody and the PE labeled detection antibody. The thin histogram line reflects the negative control: cells only incubated with the anti-his antibody and the detection antibody.

[0250] FIG. 12

[0251] Cytotoxicity activity induced by designated cross-species specific EGFR specific single chain constructs redirected to indicated target cell lines. A) and B) Stimulated CD4−/CD56− human PBMCs are used as effector cells, CHO cells transfected with human EGFR as target cells. The assay is performed as described in Example 13.

[0252] FIG. 13

[0253] Cytotoxicity activity induced by designated cross-species specific EGFR specific single chain constructs redirected to indicated target cell lines. A) and B) The macaque T cell line 4119 LnPx are used as effector cells, CHO cells transfected with cynomolgus EGFR as target cells. The assay is performed as described in Example 13.

[0254] FIG. 14

[0255] FACS binding analysis of designated cross-species specific bispecific single chain constructs to CHO cells transfected with the human MCSP D3, human CD3+ T cell line HPB-ALL, CHO cells transfected with cynomolgus MCSP D3 and a macaque T cell line 4119 LnPx. The FACS staining is performed as described in Example 17. The thick line represents cells incubated with 2 μg/ml purified protein that are subsequently incubated with the anti-his antibody and the PE labeled detection antibody. The thin histogram line reflects the negative control: cells only incubated with the anti-his antibody and the detection antibody.

[0256] FIG. 15

[0257] FACS binding analysis of designated cross-species specific bispecific single chain constructs CHO cells transfected with the human MCSP D3, human CD3+ T cell line HPB-ALL, CHO cells transfected with cynomolgus MCSP D3 and a macaque T cell line 4119 LnPx. The FACS staining is performed as described in Example 17. The thick line represents cells incubated with 2 μg/ml purified protein that are subsequently incubated with the anti-his antibody and the PE labeled detection antibody. The thin histogram line reflects the negative control: cells only incubated with the anti-his antibody and the detection antibody.

[0258] FIG. 16

[0259] FACS binding analysis of designated cross-species specific bispecific single chain constructs CHO cells transfected with the human MCSP D3, human CD3+ T cell line HPB-ALL, CHO cells transfected with cynomolgus MCSP D3 and a macaque T cell line 4119 LnPx. The FACS staining is performed as described in Example 17. The thick line represents cells incubated with 2 μg/ml purified monomeric protein that are subsequently incubated with the anti-his antibody and the PE labeled detection antibody. The thin histogram line reflects the negative control: cells only incubated with the anti-his antibody and the detection antibody.

[0260] FIG. 17

[0261] Cytotoxicity activity induced by designated cross-species specific MCSP specific single chain constructs redirected to indicated target cell lines. A) Stimulated CD4−/CD56− human PBMCs are used as effector cells, CHO cells transfected with human MCSP D3 as target cells. B) The macaque T cell line 4119 LnPx are used as effector cells, CHO cells transfected with cynomolgus MCSP D3 as target cells. The assay is performed as described in Example 18.

[0262] FIG. 18

[0263] Cytotoxicity activity induced by designated cross-species specific MCSP specific single chain constructs redirected to indicated target cell lines. A) and B) The macaque T cell line 4119 LnPx are used as effector cells, CHO cells transfected with cynomolgus MCSP D3 as target cells. The assay is performed as described in Example 18.

[0264] FIG. 19

[0265] Cytotoxicity activity induced by designated cross-species specific MCSP specific single chain constructs redirected to indicated target cell lines. A) and B) Stimulated CD4−/CD56− human PBMCs are used as effector cells, CHO cells transfected with human MCSP D3 as target cells. The assay is performed as described in Example 18.

[0266] FIG. 20

[0267] Cytotoxicity activity induced by designated cross-species specific MCSP specific single chain constructs redirected to indicated target cell lines. A) Stimulated CD4−/CD56− human PBMCs are used as effector cells, CHO cells transfected with human MCSP D3 as target cells. B) The macaque T cell line 4119 LnPx are used as effector cells, CHO cells transfected with cynomolgus MCSP D3 as target cells. The assay is performed as described in Example 18.

[0268] FIG. 21

[0269] Cytotoxicity activity induced by designated cross-species specific MCSP specific single chain constructs redirected to indicated target cell lines. A) Stimulated CD4−/CD56− human PBMCs are used as effector cells, CHO cells transfected with human MCSP D3 as target cells. B) The macaque T cell line 4119 LnPx are used as effector cells, CHO cells transfected with cynomolgus MCSP D3 as target cells. The assay is performed as described in Example 18.

[0270] FIG. 22

[0271] Plasma stability of MCSP and CD3 cross-species specific bispecific single chain antibodies tested by the measurement of cytotoxicity activity induced by samples of the designated single chain constructs incubated with 50% human plasma at 37° C. and 4° C. for 24 hours respectively or with addition of 50% human plasma immediately prior to cytotoxicity testing or without addition of plasma. CHO cells transfected with human MCSP are used as target cell line and stimulated CD4−/CD56− human PBMCs are used as effector cells. The assay is performed as described in Example 19.

[0272] FIG. 23

[0273] FACS binding analysis of designated cross-species specific bispecific single chain constructs to CHO cells transfected with human HER2, the human CD3+ T cell line HPB-ALL, CHO cells transfected with macaque HER2 and the macaque T cell line 4119LnPx respectively. The FACS staining is performed as described in Example 23.4. The bold lines represent cells incubated with 2 μg/ml purified bispecific single chain construct. The thin lines reflect the negative controls. PBS with 2% FCS was used as negative control. For each cross-species specific bispecific single chain construct the overlay of the histograms shows specific binding of the construct to human and macaque HER2 and human and macaque CD3.

[0274] FIG. 24

[0275] The diagrams show results of chromium release assays measuring cytotoxic activity induced by designated cross-species specific HER2 specific single chain constructs redirected to the indicated target cell lines. Effector cells were also used as indicated. The assays are performed as described in Example 23.5. The diagrams clearly demonstrate for each construct shown the potent recruitment of cytotoxic activity of human and macaque effector cells against human and macaque HER2 transfected CHO cells, respectively.

[0276] FIG. 25

[0277] CD3 specific ELISA analysis of periplasmic preparations containing Flag tagged scFv protein fragments from selected clones. Periplasmic preparations of soluble scFv protein fragments were added to wells of an ELISA plate, which had been coated with soluble human CD3 epsilon (aa 1-27)-Fc fusion protein and had been additionally blocked with PBS 3% BSA. Detection was performed by a monoclonal anti Flag-Biotin-labeled antibody followed by peroxidase-conjugated Streptavidin. The ELISA was developed by an ABTS substrate solution. The OD values (y axis) were measured at 405 nm by an ELISA reader. Clone names are presented on the x axis.

[0278] FIG. 26

[0279] ELISA analysis of periplasmic preparations containing Flag tagged scFv protein fragments from selected clones. The same periplasmic preparations of soluble scFv protein fragments as in FIG. 25 were added to wells of an ELISA plate which had not been coated with human CD3 epsilon (aa 1-27)-Fc fusion protein but with hulgG1 (Sigma) and blocked with 3% BSA in PBS.

[0280] Detection was performed by a monoclonal anti Flag-Biotin-labeled antibody followed by peroxidase-conjugated Streptavidin. The ELISA was developed by an ABTS substrate solution. The OD values (y axis) were measured at 405 nm by an ELISA reader. Clone names are presented on the x axis.

[0281] The present invention is additionally described by way of the following illustrative non-limiting examples that provide a better understanding of the present invention and of its many advantages.

### EXAMPLES

### 1. Identification of CD3Epsilon Sequences from Blood Samples of Non-Human Primates

[0282] Blood samples of the following non-human primates were used for CD3epsilon-identification: Callithrix jacchus, Saguinus oedipus and Saimiris ciureus. Fresh heparin-treated whole blood samples were prepared for isolating total cellular RNA according to manufacturer's protocol (QIAamp RNA Blood Mini Kit, Qiagen). The extracted mRNA was transcribed into cDNA according to published protocols. In brief, 10 μl of precipitated RNA was incubated with 1.2 μl of 10× hexanucleotide mix (Roche) at 70° C. for 10 minutes and stored on ice. A reaction mix consisting of 4 μl of 5× superscript II buffer, 0.2 μl of 0.1M dithiothreitole, 0.8 μl of superscript II (Invitrogen), 1.2 μl of desoxyribonucleoside triphosphates (25 μM), 0.8 μl of RNase Inhibitor (Roche) and 1.8 μl of DNase and RNase free water (Roth) was added. The reaction mix was incubated at room temperature for 10 minutes followed by incubation at 42° C. for 50 minutes and at 90° C. for 5 minutes. The reaction was cooled on ice before adding 0.8 μl of RNaseH (1 U/μl, Roche) and incubated for 20 minutes at 37° C.

[0283] The first-strand cDNAs from each species were subjected to separate 35-cycle polymerase chain reactions using Taq DNA polymerase (Sigma) and the following primer combination designed on database research: forward primer 5′-AGAGTTCTGGGCCTCTGC-3′ (SEQ ID NO: 377); reverse primer 5′-CGGATGGGCTCATAGTCTG-3′ (SEQ ID NO: 378). The amplified 550 bp-bands were gel purified (Gel Extraction Kit, Qiagen) and sequenced (Sequiserve, Vaterstetten/Germany, see sequence listing).

[0284] CD3Epsilon Callithrix jacchus

Nucleotides
CAGGACGGTAATGAAGAAATGGGTGATACTACACAGAACCCATATAAAGT
TTCCATCTCAGGAACCACAGTAACACTGACATGCCCTCGGTATGATGGA
CATGAAATAAAATGGCTCGTAAATAGTCAAAACAAAGAAGGTCATGAGG
ACCACCTGTTACTGGAGGACTTTTCGGAAATGGAGCAAAGTGGTTATTAT
GCCTGCCTCTCCAAAGAGACTCCCGCAGAAGAGGCGAGCCATTATCTC
TACCTGAAGGCAAGAGTGTGTGAGAACTGCGTGGAGGTGGAT
Amino acids
QDGNEEMGDTTQNPYKVSISGTTVTLTCPRYDGHEIKWLVNSQNKEGHE
DHLLLEDFSEMEQSGYYACLSKETPAEEASHYLYLKARVCENCVEVD

[0285] CD3Epsilon Saquinus oedipus

Nucleotides
CAGGACGGTAATGAAGAAATGGGTGATACTACACAGAACCCATATAAAGT
TTCCATCTCAGGAACCACAGTAACACTGACATGCCCTCGGTATGATGGAC
ATGAAATAAAATGGCTTGTAAATAGTCAAAACAAAGAAGGTCATGAGGAC
CACCTGTTACTGGAGGATTTTTCGGAAATGGAGCAAAGTGGTTATTATGC
CTGCCTCTCCAAAGAGACTCCCGCAGAAGAGGCGAGCCATTATCTCTA
CCTGAAGGCAAGAGTGTGTGAGAACTGCGTGGAGGTGGAT
Amino acids
QDGNEEMGDTTQNPYKVSISGTTVTLTCPRYDGHEIKWLVNSQNKEGHED
HLLLEDFSEMEQSGYYACLSKETPAEEASHYLYLKARVCENCVEVD

[0286] CD3Epsilon Saimiris ciureus

Nucleotides
CAGGACGGTAATGAAGAGATTGGTGATACTACCCAGAACCCATATAAAGT
TTCCATCTCAGGAACCACAGTAACACTGACATGCCCTCGGTATGATGGAC
AGGAAATAAAATGGCTCGTAAATGATCAAAACAAAGAAGGTCATGAGGAC
CACCTGTTACTGGAAGATTTTTCAGAAATGGAACAAAGTGGTTATTATGC
CTGCCTCTCCAAAGAGACCCCCACAGAAGAGGCGAGCCATTATCTCTACC
TGAAGGCAAGAGTGTGTGAGAACTGCGTGGAGGTGGAT
Amino acids
QDGNEEIGDTTQNPYKVSISGTTVTLTCPRYDGQEIKWLVNDQNKEGHED
HLLLEDFSEMEQSGYYACLSKETPTEEASHYLYLKARVCENCVEVD

### 2. Generation of Cross-Species Specific Single Chain Antibody Fragments (scFv) Binding to the N-Terminal Amino Acids 1-27 of CD3Epsilon of Man and Different Non-Chimpanzee Primates

[0287] 2.1. Immunization of Mice Using the N-Terminus of CD3Epsilon Separated from its Native CD3-Context by Fusion to a Heterologous Soluble Protein

[0288] Ten weeks old F1 mice from balb/c×C57black crossings were immunized with the CD3epsilon-Fc fusion protein carrying the most N-terminal amino acids 1-27 of the mature CD3epsilon chain (1-27 CD3-Fc) of man and/or saimiris ciureus. To this end 40 μg of the 1-27 CD3-Fc fusion protein with 10 nmol of a thioate-modified CpG-Oligonucleotide (5′-tccatgacgttcctgatgct-3′) in 300 μl PBS were injected per mouse intra-peritoneally. Mice receive booster immunizations after 21, 42 and optionally 63 days in the same way. Ten days after the first booster immunization, blood samples were taken and antibody serum titer against 1-27 CD3-Fc fusion protein iwa tested by ELISA. Additionally, the titer against the CD3-positive human T cell line HPBaII was tested in flow cytometry according to standard protocols. Serum titers were significantly higher in immunized than in non-immunized animals.

[0289] 2.2. Generation of an Immune Murine Antibody scFv Library: Construction of a Combinatorial Antibody Library and Phage Display

[0290] Three days after the last injection the murine spleen cells were harvested for the preparation of total RNA according to standard protocols.

[0291] A library of murine immunoglobuline (Ig) light chain (kappa) variable region (VK) and Ig heavy chain variable region (VH) DNA-fragments was constructed by RT-PCR on murine spleen RNA using VK- and VH specific primer. cDNA was synthesized according to standard protocols.

[0292] The primers were designed in a way to give rise to a 5′-XhoI and a 3′-BstEII recognition site for the amplified heavy chain V-fragments and to a 5′-SacI and a 3′-SpeI recognition site for amplified VK DNA fragments.

[0293] For the PCR-amplification of the VH DNA-fragments eight different 5′-VH-family specific primers (MVH1(GC)AG GTG CAG CTC GAG GAG TCA GGA CCT; MVH2 GAG GTC CAG CTC GAG CAG TCT GGA CCT; MVH3 CAG GTC CAA CTC GAG CAG CCT GGG GCT; MVH4 GAG GTT CAG CTC GAG CAG TCT GGG GCA; MVH5 GA(AG) GTG AAG CTC GAG GAG TCT GGA GGA; MVH6 GAG GTG AAG CTT CTC GAG TCT GGA GGT; MVH7 GAA GTG AAG CTC GAG GAG TCT GGG GGA; MVH8 GAG GTT CAG CTC GAG CAG TCT GGA GCT) were each combined with one 3′-VH primer (3′MuVHBstEII tga gga gac ggt gac cgt ggt ccc ttg gcc cca g); for the PCR amplification of the VK-chain fragments seven different 5′-VK-family specific primers (MUVK1 CCA GTT CCG AGC TCG TTG TGA CTC AGG AAT CT; MUVK2 CCA GTT CCG AGC TCG TGT TGA CGC AGC CGC CC; MUVK3 CCA GTT CCG AGC TCG TGC TCA CCC AGT CTC CA; MUVK4 CCA GTT CCG AGC TCC AGA TGA CCC AGT CTC CA; MUVK5 CCA GAT GTG AGC TCG TGA TGA CCC AGA CTC CA; MUVK6 CCA GAT GTG AGC TCG TCA TGA CCC AGT CTC CA; MUVK7 CCA GTT CCG AGC TCG TGA TGA CAC AGT CTC CA) were each combined with one 3′-VK primer (3′MuVkHindIII/BsiW1 tgg tgc act agt cgt acg ttt gat ctc aag ctt ggt ccc).

[0294] The following PCR program was used for amplification: denaturation at 94° C. for 20 sec; primer annealing at 52° C. for 50 sec and primer extension at 72° C. for 60 sec and 40 cycles, followed by a 10 min final extension at 72° C.

[0295] 450 ng of the kappa light chain fragments (SacI-SpeI digested) were ligated with 1400 ng of the phagemid pComb3H5Bhis (SacI-SpeI digested; large fragment). The resulting combinatorial antibody library was then transformed into 300 ul of electrocompetent Escherichia coli XL1 Blue cells by electroporation (2.5 kV, 0.2 cm gap cuvette, 25 uFD, 200 Ohm, Biorad gene-pulser) resulting in a library size of more than 10⁷ independent clones. After one hour of phenotype expression, positive transformants were selected for carbenicilline resistance encoded by the pComb3H5BHis vector in 100 ml of liquid super broth (SB)-culture over night. Cells were then harvested by centrifugation and plasmid preparation was carried out using a commercially available plasmid preparation kit (Qiagen).

[0296] 2800 ng of this plasmid-DNA containing the VK-library (XhoI-BstEII digested; large fragment) were ligated with 900 ng of the heavy chain V-fragments (XhoI-BstEII digested) and again transformed into two 300 ul aliquots of electrocompetent E. coli XL1 Blue cells by electroporation (2.5 kV, 0.2 cm gap cuvette, 25 uFD, 200 Ohm) resulting in a total VH-VK scFv (single chain variable fragment) library size of more than 10⁷ independent clones.

[0297] After phenotype expression and slow adaptation to carbenicillin, the E. coli cells containing the antibody library were transferred into SB-Carbenicillin (50 ug/mL) selection medium. The E. coli cells containing the antibody library was then infected with an infectious dose of 10¹² particles of helper phage VCSM13 resulting in the production and secretion of filamentous M13 phage, wherein phage particle contains single stranded pComb3H5BHis-DNA encoding a murine scFv-fragment and displayed the corresponding scFv-protein as a translational fusion to phage coat protein III. This pool of phages displaying the antibody library was later used for the selection of antigen binding entities.

[0298] 2.3. Phage Display Based Selection of CD3-Specific Binders

[0299] The phage library carrying the cloned scFv-repertoire was harvested from the respective culture supernatant by PEG8000/NaCl precipitation and centrifugation. Approximately 10¹¹ to 10¹² scFv phage particles were resuspended in 0.4 ml of PBS/0.1% BSA and incubated with 10⁵ to 10⁷ Jurkat cells (a CD3-positive human T-cell line) for 1 hour on ice under slow agitation. These Jurkat cells were grown beforehand in RPMI medium enriched with fetal calf serum (10%), glutamine and penicillin/streptomycin, harvested by centrifugation, washed in PBS and resuspended in PBS/1% FCS (containing Na Azide). scFv phage which do not specifically bind to the Jurkat cells were eliminated by up to five washing steps with PBS/1% FCS (containing Na Azide). After washing, binding entities were eluted from the cells by resuspending the cells in HCl-glycine pH 2.2 (10 min incubation with subsequent vortexing) and after neutralization with 2 M Tris pH 12, the eluate was used for infection of a fresh uninfected E. coli XL1 Blue culture (OD600>0.5). The E. coli culture containing E. coli cells successfully transduced with a phagemid copy, encoding a human scFv-fragment, were again selected for carbenicillin resistance and subsequently infected with VCMS 13 helper phage to start the second round of antibody display and in vitro selection. A total of 4 to 5 rounds of selections were carried out, normally.

[0300] 2.4. Screening for CD3-Specific Binders

[0301] Plasmid DNA corresponding to 4 and 5 rounds of panning was isolated from E. coli cultures after selection. For the production of soluble scFv-protein, VH-VL-DNA fragments were excised from the plasmids (XhoI-SpeI). These fragments were cloned via the same restriction sites in the plasmid pComb3H5BFlag/His differing from the original pComb3H5BHis in that the expression construct (e.g. scFv) includes a Flag-tag (TGD YKDDDDK) between the scFv and the His6-tag and the additional phage proteins were deleted. After ligation, each pool (different rounds of panning) of plasmid DNA was transformed into 100 μl heat shock competent E. coli TG1 or XLI blue and plated onto carbenicillin LB-agar. Single colonies were picked into 100 ul of LB carb (50 ug/ml).

[0302] E. coli transformed with pComb3H5BHis containing a VL- and VH-segment produce soluble scFv in sufficient amounts after excision of the gene III fragment and induction with 1 mM IPTG. Due to a suitable signal sequence, the scFv-chain was exported into the periplasma where it folds into a functional conformation.

[0303] Single E. coli TG1 bacterial colonies from the transformation plates were picked for periplasmic small scale preparations and grown in SB-medium (e.g. 10 ml) supplemented with 20 mM MgCl2 and carbenicillin 50 μg/ml (and re-dissolved in PBS (e.g. 1 ml) after harvesting. By four rounds of freezing at −70° C. and thawing at 37° C., the outer membrane of the bacteria was destroyed by temperature shock and the soluble periplasmic proteins including the scFvs were released into the supernatant. After elimination of intact cells and cell-debris by centrifugation, the supernatant containing the human anti-human CD3-scFvs was collected and used for further examination.

[0304] 2.5. Identification of CD3-Specific Binders

[0305] Binding of the isolated scFvs was tested by flow cytometry on eukaryotic cells, which on their surface express a heterologous protein displaying at its N-terminus the first 27 N-terminal amino acids of CD3epsilon.

[0306] As described in Example 4, the first amino acids 1-27 of the N-terminal sequence of the mature CD3 epsilon chain of the human T cell receptor complex (amino acid sequence: QDGNEEMGGITQTPYKVSISGTTVILT) were fused to the N-terminus of the transmembrane protein EpCAM so that the N-terminus was located at the outer cell surface. Additionally, a FLAG epitope was inserted between the N-terminal 1-27 CD3epsilon sequence and the EpCAM sequence. This fusion product was expressed in human embryonic kidney (HEK) and chinese hamster ovary (CHO) cells.

[0307] Eukaryotic cells displaying the 27 most N-terminal amino acids of mature CD3epsilon of other primate species were prepared in the same way for Saimiri ciureus (Squirrel monkey) (CD3epsilon N-terminal amino acid sequence: QDGNEEIGDTTQNPYKVSISGTTVTLT), for Callithrix jacchus (CD3epsilon N-terminal amino acid sequence: QDGNEEMGDTTQNPYKVSISGTTVTLT) and for Saguinus oedipus (CD3epsilon N-terminal amino acid sequence: QDGNEEMGDTTQNPYKVSISGTTVTLT).

[0308] For flow cytometry 2.5×10⁵ cells are incubated with 50 ul supernatant or with 5 μg/ml of the purified constructs in 50 μl PBS with 2% FCS. The binding of the constructs was detected with an anti-His antibody (Penta-His Antibody, BSA free, Qiagen GmbH, Hilden, FRG) at 2 μg/ml in 50 μl PBS with 2% FCS. As a second step reagent a R-Phycoerythrin-conjugated affinity purified F(ab′)2 fragment, goat anti-mouse IgG (Fc-gamma fragment specific), diluted 1:100 in 50 μl PBS with 2% FCS (Dianova, Hamburg, FRG) was used. The samples were measured on a FACSscan (BD biosciences, Heidelberg, FRG).

[0309] Binding was always confirmed by flowcytometry as described in the foregoing paragraph on primary T cells of man and different primates (e.g. saimiris ciureus, callithrix jacchus, saguinus oedipus).

[0310] 2.6. Generation of Human/Humanized Equivalents of Non-Human CD3Epsilon Specific scFvs

[0311] The VH region of the murine anti-CD3 scFv was aligned against human antibody germline amino acid sequences. The human antibody germline VH sequence was chosen which has the closest homology to the non-human VH and a direct alignment of the two amino acid sequences was performed. There were a number of framework residues of the non-human VH that differ from the human VH framework regions (“different framework positions”). Some of these residues may contribute to the binding and activity of the antibody to its target.

[0312] To construct a library that contain the murine CDRs and at every framework position that differs from the chosen human VH sequence both possibilities (the human and the maternal murine amino acid residue), degenerated oligonucleotides were synthesized. These oligonucleotides incorporate at the differing positions the human residue with a probability of 75% and the murine residue with a probability of 25%. For one human VH e.g. six of these oligonucleotides had to be synthesized that overlap in a terminal stretch of approximately 20 nucleotides. To this end every second primer was an antisense primer. Restriction sites needed for later cloning within the oligonucleotides were deleted.

[0313] These primers may have a length of 60 to 90 nucleotides, depending on the number of primers that were needed to span over the whole V sequence.

[0314] These e.g. six primers were mixed in equal amounts (e.g. 1 μl of each primer (primer stocks 20 to 100 μM) to a 20 μl PCR reaction) and added to a PCR mix consisting of PCR buffer, nucleotides and Taq polymerase. This mix was incubated at 94° C. for 3 minutes, 65° C. for 1 minute, 62° C. for 1 minute, 59° C. for 1 minute, 56° C. for 1 minute, 52° C. for 1 minute, 50° C. for 1 minute and at 72° C. for 10 minutes in a PCR cycler. Subsequently the product was run in an agarose gel electrophoresis and the product of a size from 200 to 400 isolated from the gel according to standard methods.

[0315] This PCR product was then used as a template for a standard PCR reaction using primers that incorporate N-terminal and C-terminal suitable cloning restriction sites. The DNA fragment of the correct size (for a VH approximately 350 nucleotides) was isolated by agarose gel electrophoresis according to standard methods. In this way sufficient VH DNA fragment was amplified. This VH fragment was now a pool of VH fragments that have each one a different amount of human and murine residues at the respective differing framework positions (pool of humanized VH). The same procedure was performed for the VL region of the murine anti-CD3 scFv (pool of humanized VL).

[0316] The pool of humanized VH was then combined with the pool of humanized VL in the phage display vector pComb3H5Bhis to form a library of functional scFvs from which—after display on filamentous phage—anti-CD3 binders were selected, screened, identified and confirmed as described above for the parental non-human (murine) anti-CD3 scFv. Single clones were then analyzed for favorable properties and amino acid sequence. Those scFvs which were closest in amino acid sequence homology to human germline V-segments are preferred particularly those wherein at least one. CDR among CDR I and II of VH and CDR I and II of VLkappa or CDR I and II of VLlambda shows more than 80% amino acid sequence identity to the closest respective CDR of all human germline V-segments. Anti-CD3 scFvs were converted into recombinant bispecific single chain antibodies as described in the following Examples 10 and 16 and further characterized.

### 3. Generation of a Recombinant Fusion Protein of the N-Terminal Amino Acids 1-27 of the Human CD3 Epsilon Chain Fused to the Fc-Part of an IgG1 (1-27 CD3-Fc)

[0317] 3.1. Cloning and Expression of 1-27 CD3-Fc

[0318] The coding sequence of the 1-27 N-terminal amino acids of the human CD3 epsilon chain fused to the hinge and Fc gamma region of human immunoglobulin IgG1 as well as an 6 Histidine Tag were obtained by gene synthesis according to standard protocols (cDNA sequence and amino acid sequence of the recombinant fusion protein are listed under SEQ ID NOs 350 and 349). The gene synthesis fragment was designed as to contain first a Kozak site for eukaryotic expression of the construct, followed by an 19 amino acid immunoglobulin leader peptide, followed in frame by the coding sequence of the first 27 amino acids of the extracellular portion of the mature human CD3 epsilon chain, followed in frame by the coding sequence of the hinge region and Fc gamma portion of human IgG1, followed in frame by the coding sequence of a 6 Histidine tag and a stop codon (FIG. 1). The gene synthesis fragment was also designed as to introduce restriction sites at the beginning and at the end of the cDNA coding for the fusion protein. The introduced restriction sites, EcoRI at the 5′ end and SalI at the 3′ end, are utilized in the following cloning procedures. The gene synthesis fragment was cloned via EcoRI and SalI into a plasmid designated pEF-DHFR (pEF-DHFR is described in Mack et al. Proc. Natl. Acad. Sci. USA 92 (1995) 7021-7025) following standard protocols. A sequence verified plasmid was used for transfection in the FreeStyle 293 Expression System (Invitrogen GmbH, Karlsruhe, Germany) according to the manufacturers protocol. After 3 days cell culture supernatants of the transfectants were harvested and tested for the presence of the recombinant construct in an ELISA assay. Goat anti-human IgG, Fc-gamma fragment specific antibody (obtained from Jackson ImmunoResearch Europe Ltd., Newmarket, Suffolk, UK) was diluted in PBS to 5 μg/ml and coated with 100 μl per well onto a MaxiSorp 96-well ELISA plate (Nunc GmbH & Co. KG, Wiesbaden, Germany) over night at 4° C. Wells were washed with PBS with 0.05% Tween 20 (PBS/Tween and blocked with 3% BSA in PBS (bovine Albumin, fraction V, Sigma-Aldrich Chemie GmbH, Taufkirchen, Germany) for 60 minutes at room temperature (RT). Subsequently, wells were washed again PBS/Tween and then incubated with cell culture supernatants for 60 minutes at RT. After washing wells were incubated with a peroxidase conjugated anti-His6 antibody (Roche Diagnostics GmbH, Roche Applied Science, Mannheim, Germany) diluted 1:500 in PBS with 1% BSA for 60 minutes at RT. Subsequently, wells were washed with 200 μl PBS/Tween and 100 μl of the SIGMAFAST OPD (SIGMAFAST OPD [o-Phenylenediamine dihydrochloride] substrate solution (Sigma-Aldrich Chemie GmbH, Taufkirchen, Germany) was added according to the manufacturers protocol. The reaction was stopped by adding 100 μl 1 M H₂SO₄. Color reaction was measured on a PowerWaveX microplate spectrophotometer (BioTek Instruments, Inc., Winooski, Vt., USA) at 490 nm and subtraction of background absorption at 620 nm. As shown in FIG. 2 presence of the construct as compared to irrelevant supernatant of mock-transfected HEK 293 cells used as negative control was clearly detectable.

[0319] 3.2. Binding Assay of Cross-Species Specific Single Chain Antibodies to 1-27 CD3-Fc.

[0320] Binding of crude preparations of periplasmatically expressed cross-species specific single chain antibodies specific for CD3 epsilon to 1-27 CD3-Fc was tested in an ELISA assay. Goat anti-human IgG, Fc-gamma fragment specific antibody (Jackson ImmunoResearch Europe Ltd., Newmarket, Suffolk, UK) was diluted in PBS to 5 μg/ml and coated with 100 μl per well onto a MaxiSorp 96-well ELISA plate (Nunc GmbH & Co. KG, Wiesbaden, Germany) over night at 4° C. Wells were washed with PBS with 0.05% Tween 20 (PBS/Tween and blocked with PBS with 3% BSA (bovine Albumin, fraction V, Sigma-Aldrich Chemie GmbH, Taufkirchen, Germany) for 60 minutes at RT. Subsequently, wells were washed with PBS/Tween and incubated with supernatants of cells expressing the 1-27 CD3-Fc construct for 60 minutes at RT. Wells were washed with PBS/Tween and incubated with crude preparations of periplasmatically expressed cross-species specific single-chain antibodies as described above for 60 minutes at room temperature. After washing with PBS/Tween wells were incubated with peroxidase conjugated anti-Flag M2 antibody (Sigma-Aldrich Chemie GmbH, Taufkirchen, Germany) diluted 1:10000 in PBS with 1% BSA for 60 minutes at RT. Wells were washed with PBS/Tween and incubated with 100 μl of the SIGMAFAST OPD (OPD [o-Phenylenediamine dihydrochloride] substrate solution (Sigma-Aldrich Chemie GmbH, Taufkirchen, Germany) according to the manufacturers protocol. Color reaction was stopped with 100 μl 1 M H₂SO₄ and measured on a PowerWaveX microplate spectrophotometer (BioTek Instruments, Inc., Winooski, Vt., USA) at 490 nm and subtraction of background absorption at 620 nm. Strong binding of cross-species specific human single chain antibodies specific for CD3 epsilon to the 1-27 CD3-Fc construct compared to a murine anti CD3 single-chain antibody was observed (FIG. 3).

### 4. Generation of Recombinant Transmembrane Fusion Proteins of the N-Terminal Amino Acids 1-27 of CD3 Epsilon from Different Non-Chimpanzee Primates Fused to EpCAM from Cynomolgus Monkey (1-27 CD3-EpCAM)

[0321] 4.1. Cloning and Expression of 1-27 CD3-EpCAM

[0322] CD3 epsilon was isolated from different non-chimpanzee primates (marmoset, tamarin, squirrel monkey) and swine. The coding sequences of the 1-27 N-terminal amino acids of CD3 epsilon chain of the mature human, common marmoset (Callithrix jacchus), cottontop tamarin (Saguinus oedipus), common squirrel monkey (Saimiri sciureus) and domestic swine (Sus scrofa; used as negative control) fused to the N-terminus of Flag tagged cynomolgus EpCAM were obtained by gene synthesis according to standard protocols. cDNA sequence and amino acid sequence of the recombinant fusion proteins are listed under SEQ ID NOs 351 to 360). The gene synthesis fragments were designed as to contain first a BsrGI site to allow fusion in correct reading frame with the coding sequence of a 19 amino acid immunoglobulin leader peptide already present in the target expression vector, which is followed in frame by the coding sequence of the N-terminal 1-27 amino acids of the extracellular portion of the mature CD3 epsilon chains, which is followed in frame by the coding sequence of a Flag tag and followed in frame by the coding sequence of the mature cynomolgus EpCAM transmembrane protein (FIG. 4). The gene synthesis fragments were also designed to introduce a restriction site at the end of the cDNA coding for the fusion protein. The introduced restriction sites BsrGI at the 5′ end and SalI at the 3′ end, were utilized in the following cloning procedures. The gene synthesis fragments were then cloned via BsrGI and SalI into a derivative of the plasmid designated pEF DHFR (pEF-DHFR is described in Mack et al. Proc. Natl. Acad. Sci. USA 92 (1995) 7021-7025), which already contained the coding sequence of the 19 amino acid immunoglobulin leader peptide following standard protocols. Sequence verified plasmids were used to transiently transfect 293-HEK cells using the MATra-A Reagent (IBA GmbH, Göttingen, Germany) and 12 μg of plasmid DNA for adherent 293-HEK cells in 175 ml cell culture flasks according to the manufacturers protocol. After 3 days of cell culture the transfectants were tested for cell surface expression of the recombinant transmembrane protein via an FACS assay according to standard protocols. For that purpose a number of 2.5×10⁵ cells were incubated with the anti-Flag M2 antibody (Sigma-Aldrich Chemie GmbH, Taufkirchen, Germany) at 5 μg/ml in PBS with 2% FCS. Bound antibody was detected with an R-Phycoerythrin-conjugated affinity purified F(ab′)2 fragment, goat anti-mouse IgG, Fc-gamma fragment specific 1:100 in PBS with 2% FCS (Jackson ImmunoResearch Europe Ltd., Newmarket, Suffolk, UK). The samples were measured on a FACScalibur (BD biosciences, Heidelberg, Germany). Expression of the Flag tagged recombinant transmembrane fusion proteins consisting of cynomolgus EpCAM and the 1-27 N-terminal amino acids of the human, marmoset, tamarin, squirrel monkey and swine CD3 epsilon chain respectively on transfected cells was clearly detectable (FIG. 5).

[0323] 4.2. Binding of Cross-Species Specific Anti-CD3 Single Chain Antibodies to the 1-27 CD3-EpCAM

[0324] Binding of crude preparations of periplasmatically expressed cross-species specific anti CD3 single-chain antibodies to the 1-27 N-terminal amino acids of the human, marmoset, tamarin and squirrel monkey CD3 epsilon chains respectively fused to cynomolgus Ep-CAM was tested in an FACS assay according to standard protocols. For that purpose a number of 2.5×10⁵ cells were incubated with crude preparations of periplasmatically expressed cross-species specific anti CD3 single-chain antibodies (preparation was performed as described above and according to standard protocols) and a single-chain murine anti-human CD3 antibody as negative control. As secondary antibody the Penta-His antibody (Qiagen GmbH, Hildesheim, Germany) was used at 5 μg/ml in 50 μl PBS with 2% FCS. The binding of the antibody was detected with an R-Phycoerythrin-conjugated affinity purified F(ab′)2 fragment, goat anti-mouse IgG, Fc-gamma fragment specific, diluted 1:100 in PBS with 2% FCS (Jackson ImmunoResearch Europe Ltd., Newmarket, Suffolk, UK). The samples were measured on a FACScalibur (BD biosciences, Heidelberg, Germany). As shown in FIGS. 6 (A to E) binding of single chain antibodies to the transfectants expressing the recombinant transmembrane fusion proteins consisting of the 1-27 N-terminal amino acids of CD3 epsilon of the human, marmoset, tamarin or squirrel monkey fused to cynomolgus EpCAM was observed. No binding of cross-species specific single chain antibodies was observed to a fusion protein consisting of the 1-27 N-terminal CD3 epsilon of swine fused to cynomolgus EpCAM used as negative control. Multi-primate cross-species specificity of the anti-CD3 single chain antibodies was shown. Signals obtained with the anti Flag M2 antibody and the cross-species specific single chain antibodies were comparable, indicating a strong binding activity of the cross-species specific single chain antibodies to the N-terminal amino acids 1-27 of CD3 epsilon.

### 5. Binding Analysis of Cross-Species Specific Anti-CD3 Single Chain Antibodies by Alanine-Scanning of Mouse Cells Transfected with the Human CD3 Epsilon Chain and its Alanine Mutants

[0325] 5.1. Cloning and Expression of Human Wild-Type CD3 Epsilon

[0326] The coding sequence of the human CD3 epsilon chain was obtained by gene synthesis according to standard protocols (cDNA sequence and amino acid sequence of the human CD3 epsilon chain are listed under SEQ ID NOs 362 and 361). The gene synthesis fragment was designed as to contain a Kozak site for eukaryotic expression of the construct and restriction sites at the beginning and the end of the cDNA coding for human CD3 epsilon. The introduced restriction sites EcoRI at the 5′ end and SalI at the 3′ end, were utilized in the following cloning procedures. The gene synthesis fragment was then cloned via EcoRI and SalI into a plasmid designated pEF NEO following standard protocols. pEF NEO was derived of pEF DHFR (Mack et al. Proc. Natl. Acad. Sci. USA 92 (1995) 7021-7025) by replacing the cDNA of the DHFR with the cDNA of the neomycin resistance by conventional molecular cloning. A sequence verified plasmid was used to transfect the murine T cell line EL4 (ATCC No. TIB-39) cultivated in RPMI with stabilized L-glutamine supplemented with 10% FCS, 1% penicillin/streptomycin, 1% HEPES, 1% pyruvate, 1% non-essential amino acids (all Biochrom AG Berlin, Germany) at 37° C., 95% humidity and 7% CO₂. Transfection was performed with the SuperFect Transfection Reagent (Qiagen GmbH, Hilden, Germany) and 2 μg of plasmid DNA according to the manufacturer's protocol. After 24 hours the cells were washed with PBS and cultivated again in the aforementioned cell culture medium with 600 μg/ml G418 for selection (PAA Laboratories GmbH, Pasching, Austria). 16 to 20 days after transfection the outgrowth of resistant cells was observed. After additional 7 to 14 days cells were tested for expression of human CD3 epsilon by FACS analysis according to standard protocols. 2.5×10⁵ cells were incubated with anti-human CD3 antibody UCHT-1 (BD biosciences, Heidelberg, Germany) at 5 μg/ml in PBS with 2% FCS. The binding of the antibody was detected with an R-Phycoerythrin-conjugated affinity purified F(ab′)2 fragment, goat anti-mouse IgG, Fc-gamma fragment specific, diluted 1:100 in PBS with 2% FCS (Jackson ImmunoResearch Europe Ltd., Newmarket, Suffolk, UK). The samples were measured on a FACSCalibur (BD biosciences, Heidelberg, Germany). Expression of human wild-type CD3 on transfected EL4 cells is shown in FIG. 7.

[0327] 5.2. Cloning and Expression of the Cross-Species Specific Anti-CD3 Single Chain Antibodies as IgG1 Antibodies

[0328] In order to provide improved means of detection of binding of the cross-species specific single chain anti-CD3 antibodies H2C HLP, A2J HLP and E2M HLP were converted into IgG1 antibodies with murine IgG1 and human lambda constant regions. cDNA sequences coding for the heavy and light chains of respective IgG antibodies were obtained by gene synthesis according to standard protocols. The gene synthesis fragments for each specificity were designed as to contain first a Kozak site to allow eukaryotic expression of the construct, which is followed by an 19 amino acid immunoglobulin leader peptide (SEQ ID NOs 364 and 363), which is followed in frame by the coding sequence of the respective heavy chain variable region or respective light chain variable region, followed in frame by the coding sequence of the heavy chain constant region of murine IgG1 (SEQ ID NOs 366 and 365) or the coding sequence of the human lambda light chain constant region (SEQ ID NO 368 and 367), respectively. Restriction sites were introduced at the beginning and the end of the cDNA coding for the fusion protein. Restriction sites EcoRI at the 5′ end and SalI at the 3′ end were used for the following cloning procedures. The gene synthesis fragments were cloned via EcoRI and SalI into a plasmid designated pEF DHFR (Mack et al. Proc. Natl. Acad. Sci. USA 92 (1995) 7021-7025) for the heavy chain constructs and pEF ADA (pEF ADA is described in Raum et al., Cancer Immunol Immunother., 50(3), (2001), 141-50) for the light chain constructs) according to standard protocols. Sequence verified plasmids were used for co-transfection of respective light and heavy chain constructs in the FreeStyle 293 Expression System (Invitrogen GmbH, Karlsruhe, Germany) according to the manufacturers protocol. After 3 days cell culture supernatants of the transfectants were harvested and used for the alanine-scanning experiment.

[0329] 5.3. Cloning and Expression of Alanine Mutants of Human CD3 Epsilon for Alanine-Scanning

[0330] 27 cDNA fragments coding for the human CD3 epsilon chain with an exchange of one codon of the wild-type sequence of human CD3 epsilon into a codon coding for alanine (GCC) for each amino acid of amino acids 1-27 of the extracellular domain of the mature human CD3 epsilon chain respectively were obtained by gene synthesis. Except for the exchanged codon the cDNA fragments were identical to the aforementioned human wild-type CD3 cDNA fragment. Only one codon was replaced in each construct compared to the human wild-type CD3 cDNA fragment described above. Restriction sites EcoRI and SalI were introduced into the cDNA fragments at identical positions compared to the wild-type construct. All alanine-scanning constructs were cloned into pEF NEO and sequence verified plasmids were transfected into EL4 cells. Transfection and selection of transfectants was performed as described above. As result a panel of expressed constructs was obtained wherein the first amino acid of the human CD3 epsilon chain, glutamine (Q, Gln) at position 1 was replaced by alanine. The last amino acid replaced by alanine was the threonine (T, Thr) at position 27 of mature human wild-type CD3 epsilon. For each amino acid between glutamine 1 and threonine 27 respective transfectants with an exchange of the wild-type amino acid into alanine were generated.

[0331] 5.4. Alanine-Scanning Experiment

[0332] Chimeric IgG antibodies as described in 2) and cross-species specific single chain antibodies specific for CD3 epsilon were tested in alanine-scanning experiment. Binding of the antibodies to the EL4 cell lines transfected with the alanine-mutant constructs of human CD3 epsilon as described in 3) was tested by FACS assay according to standard protocols. 2.5×10⁵ cells of the respective transfectants were incubated with 50 μl of cell culture supernatant containing the chimeric IgG antibodies or with 50 μl of crude preparations of periplasmatically expressed single-chain antibodies. For samples incubated with crude preparations of periplasmatically expressed single-chain antibodies the anti-Flag M2 antibody (Sigma-Aldrich Chemie GmbH, Taufkirchen, Germany) was used as secondary antibody at 5 μg/ml in 50 μl PBS with 2% FCS. For samples incubated with the chimeric IgG antibodies a secondary antibody was not necessary. For all samples the binding of the antibody molecules was detected with an R-Phycoerythrin-conjugated affinity purified F(ab′)2 fragment, goat anti-mouse IgG, Fc-gamma fragment specific, diluted 1:100 in PBS with 2% FCS (Jackson ImmunoResearch Europe Ltd., Newmarket, Suffolk, UK). Samples were measured on a FACSCalibur (BD biosciences, Heidelberg, Germany). Differential binding of chimeric IgG molecules or cross-species specific single-chain antibodies to the EL4 cell lines transfected with the alanine-mutants of human CD3 epsilon was detected. As negative control either an isotype control or a crude preparation of a periplasmatically expressed single-chain antibody of irrelevant specificity was used respectively. UCHT-1 antibody was used as positive control for the expression level of the alanine-mutants of human CD3 epsilon. The EL4 cell lines transfected with the alanine-mutants for the amino acids tyrosine at position 15, valine at position 17, isoleucine at position 19, valine at position 24 or leucine at position 26 of the mature CD3 epsilon chain were not evaluated due to very low expression levels (data not shown). Binding of the cross-species specific single chain antibodies and the single chain antibodies in chimeric IgG format to the EL4 cell lines transfected with the alanine-mutants of human CD3 epsilon is shown in FIG. 8 (A-D) as relative binding in arbitrary units with the geometric mean fluorescence values of the respective negative controls subtracted from all respective geometric mean fluorescence sample values. To compensate for different expression levels all sample values for a certain transfectant were then divided through the geometric mean fluorescence value of the UCHT-1 antibody for the respective transfectant. For comparison with the wild-type sample value of a specificity all sample values of the respective specificity were finally divided through the wild-type sample value, thereby setting the wild-type sample value to 1 arbitrary unit of binding.

[0333] The calculations used are shown in detail in the following formula:

$$value\_Sample ( x , y ) = \frac{Sample ( x , y ) - neg\_Contr . ( x )}{\begin{matrix}( UCHT - 1 ( x ) - neg\_Contr . ( x ) ) * \\ \frac{WT ( y ) - neg\_Contr . ( wt )}{UCHT - 1 ( wt ) - neg\_Contr . ( wt )}\end{matrix}}$$

[0334] In this equation value_Sample means the value in arbitrary units of binding depicting the degree of binding of a specific anti-CD3 antibody to a specific alanine-mutant as shown in FIG. 8 (A-D), Sample means the geometric mean fluorescence value obtained for a specific anti-CD3 antibody assayed on a specific alanine-scanning transfectant, neg_Contr. means the geometric mean fluorescence value obtained for the negative control assayed on a specific alanine-mutant, UCHT-1 means the geometric mean fluorescence value obtained for the UCHT-1 antibody assayed on a specific alanine-mutant, WT means the geometric mean fluorescence value obtained for a specific anti-CD3 antibody assayed on the wild-type transfectant, x specifies the respective transfectant, y specifies the respective anti-CD3 antibody and wt specifies that the respective transfectant is the wild-type.

[0335] As can be seen in FIG. 8 (A-D) the IgG antibody A2J HLP showed a pronounced loss of binding for the amino acids asparagine at position 4, threonine at position 23 and isoleucine at position 25 of the mature CD3 epsilon chain. A complete loss of binding of IgG antibody A2J HLP was observed for the amino acids glutamine at position 1, aspartate at position 2, glycine at position 3 and glutamate at position 5 of the mature CD3 epsilon chain. IgG antibody E2M HLP showed a pronounced loss of binding for the amino acids asparagine at position 4, threonine at position 23 and isoleucine at position 25 of the mature CD3 epsilon chain. IgG antibody E2M HLP showed a complete loss of binding for the amino acids glutamine at position 1, aspartate at position 2, glycine at position 3 and glutamate at position 5 of the mature CD3 epsilon chain. IgG antibody H2C HLP showed an intermediate loss of binding for the amino acid asparagine at position 4 of the mature CD3 epsilon chain and it showed a complete loss of binding for the amino acids glutamine at position 1, aspartate at position 2, glycine at position 3 and glutamate at position 5 of the mature CD3 epsilon chain. Single chain antibody F12Q HLP showed an essentially complete loss of binding for the amino acids glutamine at position 1, aspartate at position 2, glycine at position 3 of the mature CD3 epsilon chain and glutamate at position 5 of the mature CD3 epsilon chain.

### 6. Binding Analysis of the Cross-Species Specific Anti-CD3 Binding Molecule H2C HLP to the Human CD3 Epsilon Chain with and without N-Terminal His6 Tag Transfected into the Murine T Cell Line EL4

[0336] 6.1. Cloning and Expression of the Human CD3 Epsilon Chain with N-Terminal Six Histidine Tag (His6 tag)

[0337] A cDNA fragment coding for the human CD3 epsilon chain with a N-terminal His6 tag was obtained by gene synthesis. The gene synthesis fragment was designed as to contain first a Kozak site for eukaryotic expression of the construct, which is followed in frame by the coding sequence of a 19 amino acid immunoglobulin leader peptide, which is followed in frame by the coding sequence of a His6 tag which is followed in frame by the coding sequence of the mature human CD3 epsilon chain (the cDNA and amino acid sequences of the construct are listed as SEQ ID NOs 380 and 379). The gene synthesis fragment was also designed as to contain restriction sites at the beginning and the end of the cDNA. The introduced restriction sites EcoRI at the 5′ end and SalI at the 3′ end, were used in the following cloning procedures. The gene synthesis fragment was then cloned via EcoRI and SalI into a plasmid designated pEF-NEO (as described above) following standard protocols. A sequence verified plasmid was used to transfect the murine T cell line EL4. Transfection and selection of the transfectants were performed as described above. After 34 days of cell culture the transfectants were used for the assay described below.

[0338] 6.2. Binding of the Cross-Species Specific Anti-CD3 Binding Molecule H2C HLP to the Human CD3 Epsilon Chain with and without N-Terminal His6 Tag

[0339] A chimeric IgG antibody with the binding specificity H2C HLP specific for CD3 epsilon was tested for binding to human CD3 epsilon with and without N-terminal His6 tag. Binding of the antibody to the EL4 cell lines transfected the His6-human CD3 epsilon and wild-type human CD3 epsilon respectively was tested by an FACS assay according to standard protocols. 2.5×10⁵ cells of the transfectants were incubated with 50 μl of cell culture supernatant containing the chimeric IgG antibody or 50 μl of the respective control antibodies at 5 μg/ml in PBS with 2% FCS. As negative control an appropriate isotype control and as positive control for expression of the constructs the CD3 specific antibody UCHT-1 were used respectively. The binding of the antibodies was detected with a R-Phycoerythrin-conjugated affinity purified F(ab′)2 fragment, goat anti-mouse IgG, Fc-gamma fragment specific, diluted 1:100 in PBS with 2% FCS (Jackson ImmunoResearch Europe Ltd., Newmarket, Suffolk, UK). Samples were measured on a FACSCalibur (BD biosciences, Heidelberg, Germany). Compared to the EL4 cell line transfected with wild-type human CD3 epsilon a clear loss of binding of the chimeric IgG with binding specificity H2C HLP to human-CD3 epsilon with an N-terminal His6 tag was detected. These results showed that a free N-terminus of CD3 epsilon is essential for binding of the cross-species specific anti-CD3 binding specificity H2C HLP to the human CD3 epsilon chain (FIG. 9).

### 7. Determination of the Binding Constant KD of Bispecific Single Chain Antibody Cross-Species Specific for Primate EGFR and Primate CD3 (EGFR LH×H2C HLP) to the Fusion Protein 1-27 CD3-Fc by Plasmon Surface Resonance Measurement Compared to Binding to CD3 Expressing PBMC Measured by a Fluorescence Activated Cell Sorter (FACS)

[0340] 7.1. Plasmon Surface Resonance Measurement

[0341] To determine the binding affinity of the fully cross-species specific bispecific single chain antibody EGFR-21-63 LH×H2C HLP to amino acids 1-27 of the N-terminus of the human CD3 epsilon chain a Surface Plasmon Resonance measurement was performed with a recombinant fusion protein consisting of the N-terminal amino acids 1-27 of the mature human CD3 epsilon chain fused to a Fc-part of human IgG1 (1-27 CD3-Fc). To this end a Biacore Carboxymethyl-Dextran CM5 chip (Biacore, Uppsala, Sweden) was installed on a Biacore 2000® system (Biacore, Uppsala, Sweden). One flow cell was activated by a N-(3-Dimethylaminopropyl)-N′-ethylcarbodiimide hydrochloride/N-Hydroxysuccinimide solution according to standard procedures. A solution of the fusion protein 1-27 CD3-Fc was added afterwards resulting in stable covalent linkage of the protein to the dextran layer of the Biacore chip. Unbound protein was removed by extensive washing followed by blocking of unreacted remaining NHS-activated carboxy groups by adding an ethanolamine solution. Success of protein coupling was confirmed by a higher signal measured as Response Units compared to the signal prior to coupling. A reference cell was prepared as described but without adding a protein solution.

[0342] Purified bispecific antibody EGFR-21-63 LH×H2C HLP was extensively dialyzed against HBS-EP buffer (Biacore, Uppsala, Sweden) in a Slide-A-Lyzer® Mini Dialysis Unit (Pierce, Rockford-II, USA). Protein concentration after dialysis was determined by UV280 nm absorption resulting in a concentration of 43 μg/ml.

[0343] The protein solution was transferred into a 96 well plate and serially diluted with HBS-EP buffer at a 1:1 ratio to 10 further wells.

[0344] Surface Plasmon Resonance Measurements were done by separately sampling all 11 wells. The flow cells were regenerated with acetate buffer between measurements to release bound protein.

[0345] Binding signals of bispecific antibody molecules were obtained by subtraction of the signal of the reference cell from the signal of the measurement cell conjugated with the 1-27 CD3-Fc protein. Association and dissociation curves were measured as Response Units and recorded. The binding constants were calculated using the Biacore® curve fitting software based on the Langmuir model.

[0346] The calculated binding constant KD over the first five concentrations was determined to be 1.52×10⁻⁷ M.

[0347] 7.2. Determination of CD3 Binding Constant by FACs Measurement

[0348] In order to test the affinity of the cross-species specific bispecific antibody molecules with regard to the binding strength to native human CD3, an additional saturation FACS binding analysis was performed. The chosen bispecific antibody molecule EGFR-21-63 LH×H2C HLP was used to set up a dilution row with a factor of 1:1.5 and a starting concentration of 63.3 μg/ml. The bispecific antibody molecule was incubated at these different concentrations with 1.25×10⁵ human PBMCs each for 1 hour a 4° C. followed by two washing steps in PBS at 4° C. The detection of the bound bispecific antibody molecules was carried out by using a Penta-His antibody (Qiagen GmbH, Hildesheim, Germany) at 5 μg/ml in 50 μl PBS with 2% FCS. After incubation for 45 minutes at 4° C. and two washing steps the binding of the Penta-His antibody was detected with an R-Phycoerythrin-conjugated affinity purified F(ab′)2 fragment, goat anti-mouse IgG, Fc-gamma fragment specific, diluted 1:100 in PBS with 2% FCS (Jackson ImmunoResearch Europe Ltd., Newmarket, Suffolk, UK). Flow cytometry was performed on a FACS-Canto II apparatus, the FACS Diva software was used to acquire and analyze the data (Becton Dickinson biosciences, Heidelberg). FACS staining and measuring of the fluorescence intensity were performed as described in Current Protocols in Immunology (Coligan, Kruisbeek, Margulies, Shevach and Strober, Wiley-Interscience, 2002). The acquired fluorescence intensity mean values were plotted as a function of the used bispecific antibody molecule concentration and analyzed by the biomathematical software Prism in a one side binding analysis (hyperbola). The software calculated the corresponding KD value that described the binding of a ligand (the bispecific antibody molecule) to a receptor (the CD3 positive PBMC subfraction) that follows the law of mass action. The underlying formula is as follows: Y=Bmax×X/(Kd+X) with Bmax being the maximal binding. KD is the concentration of ligand required to reach half-maximal binding. The FACS staining was carried out in duplicates, the R² values were better than 0.95.

[0349] The determined half-maximal binding for the bispecific antibody molecule EGFR-21-63 LH×H2C HLP was reached at a concentration of 8472 ng/ml which corresponds to 154 nM (1.54×10⁻⁷ M) at a given molecular mass of 55000 Dalton (FIG. 10).

[0350] Thus, the affinity of EGFR-21-63 LH×H2C HLP to the N-terminal amino acids 1-27 of the human CD3 epsilon chain separated from their native CD3-context proved to be equal to the affinity of EGFR-21-63 LH×H2C HLP to native CD3 on intact T cells.

### 8. Generation of CHO Cells Transfected with Human EGFR

[0351] The cell line positive for human EGFR, A431 (epidermoid carcinoma cell line, CRL-1555, American Type Culture Collection, Rockville, Md.) was used to obtain the total RNA that was isolated according to the instructions of the kit manual (Qiagen, RNeasy Mini Kit, Hilden, Germany). The obtained RNA was used for cDNA synthesis by random-primed reverse transcription. For cloning of the full length sequence of the human EGFR antigen the following oligonucleotides were used:

5′ EGFR AG XbaI
5′-GGTCTAGAGCATGCGACCCTCCGGGACGGCCGGG-3′
3′ EGFR AG SalI
5′-TTTTAAGTCGACTCATGCTCCAATAAATTCACTGCT-3′

[0352] The coding sequence was amplified by PCR (denaturation at 94° C. for 5 min, annealing at 58° C. for 1 min, elongation at 72° C. for 2 min for the first cycle; denaturation at 94° C. for 1 min, annealing at 58° C. for 1 min, elongation at 72° C. for 2 min for 30 cycles; terminal extension at 72° C. for 5 min). The PCR product was subsequently digested with XbaI and SalI, ligated into the appropriately digested expression vector pEF-DHFR (Raum et al., Cancer Immunol. Immunother. 2001; 50: 141-150), and transformed into E. coli. The afore-mentioned procedures were carried out according to standard protocols (Sambrook, Molecular Cloning; A Laboratory Manual, 3rd edition, Cold Spring Harbour Laboratory Press, Cold Spring Harbour, N.Y. (2001)). A clone with sequence-verified nucleotide sequence (SEQ ID 370, Amino acid sequence SEQ ID 369) was transfected into DHFR deficient CHO cells for eukaryotic expression of the construct. Eukaryotic protein expression in DHFR deficient CHO cells was performed as described by Kaufmann R. J. (1990) Methods Enzymol. 185, 537-566. Gene amplification of the construct was induced by increasing concentrations of methothrexate (MTX) to a final concentration of up to 20 nM MTX.

### 9. Generation of CHO Cells Expressing the Extracellular Domain of Cynomolgus EGFR

[0353] The cDNA sequence of the extracellular domain of cynomolgus EGFR was obtained by a set of two PCRs on cynomolgus monkey colon cDNA (Cat#: C1534090-Cy-BC; obtained from BioCat GmbH, Heidelberg, Germany) using the following reaction conditions: 1 cycle at 94° C. for 3 minutes followed by 35 cycles with 94° C. for 1 minute, 53° C. for 1 minute and 72° C. for 2 minutes followed by a terminal cycle of 72° C. for 3 minutes. The following primers were used:

1. forward primer:
5′-CGCTCTGCCCGGCGAGTCGGGC-3′
reverse primer:
5′-CCGTCTTCCTCCATCTCATAGC-3′
2. forward primer:
5′-ACATCCGGAGGTGACAGATCACGGCTCGTGC-3′
reverse primer:
5′-CAGGATATCCGAACGATGTGGCGCCTTCGC-3′

[0354] Those PCRs generated two overlapping fragments (A: 1-869, B: 848-1923), which were isolated and sequenced according to standard protocols using the PCR primers, and thereby provided a 1923 bp portion of the cDNA sequence of cynomolgus EGFR from the third nucleotide of codon +1 of the mature protein to the 21^{st} codon of the transmembrane domain. To generate a construct for expression of cynomolgus EGFR a cDNA fragment was obtained by gene synthesis according to standard protocols (the cDNA and amino acid sequence of the construct is listed under SEQ ID Nos 372 and 371). In this construct the coding sequence for cynomolgus EGFR from amino acid +2 to +641 of the mature EGFR protein was fused into the coding sequence of human EGFR replacing the coding sequence of the amino acids +2 to +641. The gene synthesis fragment was also designed as to contain a Kozak site for eukaryotic expression of the construct and restriction sites at the beginning and the end of the cDNA coding for essentially the extracellular domain of cynomolgus EGFR fused to the transmembrane and intracellular domains of human EGFR. Furthermore a conservative mutation was introduced at amino acid 627 (4^{th} amino acid of the transmembrane domain) mutating valine into leucine to generate a restriction site (SphI) for cloning purposes. The introduced restriction sites XbaI at the 5′ end and SalI at the 3′ end, were utilised in the following cloning procedures. The gene synthesis fragment was then cloned via XbaI and SalI into a plasmid designated pEF-DHFR (pEF-DHFR is described in Mack et al. Proc. Natl. Acad. Sci. USA 92 (1995) 7021-7025). A sequence verified clone of this plasmid was used to transfect CHO/dhfr− cells as described above.

### 10. Generation of EGFR and CD3 Cross-Species Specific Bispecific Single Chain Molecules

[0355] 10.1. Cloning of Cross-Species Specific Binding Molecules

[0356] Generally, bispecific single chain antibody molecules, each comprising a domain with a binding specificity cross-species specific for human and non-chimpanzee primate CD3epsilon as well as a domain with a binding specificity cross-species specific for human and non-chimpanzee primate EGFR, were designed as set out in the following Table 1:

TABLE 1
Formats of anti-CD3 and anti-EGFR cross-species specific
bispecific single chain antibody molecules

| SEQ ID | Formats of protein constructs |
|---|---|
| (nucl/prot) | (N → C) |
| 294/293 | EGFR-21-63 LH × H2C HL |
| 296/295 | EGFR-21-63 LH × H2C HLP |
| 302/301 | EGFR-21-63 LH × A2J HLP |
| 298/297 | EGFR-21-63 LH × H1E HLP |
| 306/305 | EGFR-21-63 LH × E2M HLP |
| 308/307 | EGFR-21-63 LH × F7O HLP |
| 390/389 | EGFR1 HL × I2C HL |
| 392/391 | EGFR1 LH × I2C HL |
| 394/393 | EGFR1 HL × F12Q HL |
| 396/395 | EGFR1 LH × F12Q HL |
| 398/397 | EGFR1 HL × H2C HL |
| 400/399 | EGFR1 LH × H2C HL |
| 448/447 | EGFR1 HL × H2C HL |
| 450/449 | EGFR1 HL × F12Q LH |
| 452/451 | EGFR1 HL × I2C HL |
| 410/409 | EGFR2 HL × I2C HL |
| 412/411 | EGFR2 LH × I2C HL |
| 414/413 | EGFR2 HL × F12Q HL |
| 416/415 | EGFR2 LH × F12Q HL |
| 418/417 | EGFR2 HL × H2C HL |
| 420/419 | EGFR2 LH × H2C HL |

[0357] The aforementioned constructs containing the variable light-chain (L) and variable heavy-chain (H) domains cross-species specific for human and cynomolgus EGFR were obtained by gene synthesis. The gene synthesis fragments were designed as to contain first a Kozak site for eukaryotic expression of the construct, followed by a 19 amino acid immunoglobulin leader peptide, followed in frame by the coding sequence of the respective bispecific single chain antibody molecule, followed in frame by the coding sequence of a 6 histidine tag and a stop codon. The gene synthesis fragment was also designed as to introduce suitable N- and C-terminal restriction sites. The gene synthesis fragment was cloned via these restriction sites into a plasmid designated pEF-DHFR (pEF-DHFR is described in Raum et al. Cancer Immunol Immunother 50 (2001) 141-150) according to standard protocols (Sambrook, Molecular Cloning; A Laboratory Manual, 3rd edition, Cold Spring Harbour Laboratory Press, Cold Spring Harbour, N.Y. (2001)). A clone with sequence-verified nucleotide sequence was transfected into dihydrofolate reductase (DHFR) deficient Chinese hamster ovary (CHO) cells for eukaryotic expression of the construct.

[0358] The constructs were transfected stably or transiently into DHFR-deficient CHO-cells (ATCC No. CRL 9096) by electroporation or alternatively into HEK 293 (human embryonal kidney cells, ATCC Number: CRL-1573) in a transient manner according to standard protocols.

[0359] 10.2. Expression and Purification of the Bispecific Single Chain Antibody Molecules

[0360] The bispecific single chain antibody molecules were expressed in chinese hamster ovary cells (CHO). Eukaryotic protein expression in DHFR deficient CHO cells was performed as described by Kaufmann R. J. (1990) Methods Enzymol. 185, 537-566. Gene amplification of the constructs was induced by increasing final concentrations of MTX up to 20 nM. After two passages of stationary culture the cells were grown in roller bottles with nucleoside-free HyQ PF CHO liquid soy medium (with 4.0 mM L-Glutamine with 0.1% Pluronic F—68; HyClone) for 7 days before harvest. The cells were removed by centrifugation and the supernatant containing the expressed protein was stored at −20° C. Alternatively, constructs were transiently expressed in HEK 293 cells. Transfection was performed with 293fectin reagent (Invitrogen, #12347-019) according to the manufacturer's protocol.

[0361] Äkta® Explorer System (GE Health Systems) and Unicorn® Software were used for chromatography. Immobilized metal affinity chromatography (“IMAC”) was performed using a Fractogel EMD Chelate® (Merck) which was loaded with ZnCl2 according to the protocol provided by the manufacturer. The column was equilibrated with buffer A (20 mM sodium phosphate buffer pH 7.2, 0.1 M NaCl) and the cell culture supernatant (500 ml) was applied to the column (10 ml) at a flow rate of 3 ml/min. The column was washed with buffer A to remove unbound sample. Bound protein was eluted using a two step gradient of buffer B (20 mM sodium phosphate buffer pH 7.2, 0.1 M NaCl, 0.5 M Imidazol) according to the following:

[0362] Step 1: 20% buffer B in 6 column volumes

[0363] Step 2: 100% buffer B in 6 column volumes

[0364] Eluted protein fractions from step 2 were pooled for further purification. All chemicals were of research grade and purchased from Sigma (Deisenhofen) or Merck (Darmstadt).

[0365] Gel filtration chromatography was performed on a HiLoad 16/60 Superdex 200 prep grade column (GE/Amersham) equilibrated with Equi-buffer (25 mM Citrat, 200 mM Lysin, 5% Glycerol, pH 7.2). Eluted protein samples (flow rate 1 ml/min) were subjected to standard SDS-PAGE and Western Blot for detection. Prior to purification, the column was calibrated for molecular weight determination (molecular weight marker kit, Sigma MW GF-200). Protein concentrations were determined using OD280 nm.

[0366] Purified bispecific single chain antibody protein was analyzed in SDS PAGE under reducing conditions performed with pre-cast 4-12% Bis Tris gels (Invitrogen). Sample preparation and application were performed according to the protocol provided by the manufacturer. The molecular weight was determined with MultiMark protein standard (Invitrogen). The gel was stained with colloidal Coomassie (Invitrogen protocol). The purity of the isolated protein was >95% as determined by SDS-PAGE.

[0367] The bispecific single chain antibody has a molecular weight of about 52 kDa under native conditions as determined by gel filtration in PBS. All constructs were purified according to this method.

[0368] Western Blot was performed using an Optitran® BA-S83 membrane and the Invitrogen Blot Module according to the protocol provided by the manufacturer. The antibodies used were directed against the His Tag (Penta His, Qiagen) and Goat-anti-mouse Ig labeled with alkaline phosphatase (AP) (Sigma), and BCIP/NBT (Sigma) as substrate. A single band was detected at 52 kD corresponding to the purified bispecific single chain antibody.

### 11. Determination of the Binding Constant KD of Fully Cross-Species Specific Bispecific Single Chain Antibodies to the Fusion Protein 1-27 CD3-Fc by Surface Plasmon Resonance Measurement

[0369] To determine the binding affinities of bispecific single chain antibody molecules cross-species specific to primate EGFR and primate CD3 to the amino acids 1-27 of the N-terminus of the mature human CD3 epsilon chain a Surface Plasmon Resonance measurement was performed with a recombinant fusion protein consisting of the N-terminal amino acids 1-27 of the human CD3 epsilon chain fused to a Fc-part of human IgG1 (1-27 CD3-Fc). To this end a Biacore Carboxymethyl-Dextran CM5 chip (Biacore, Uppsala, Sweden) was installed on a Biacore 2000® system (Biacore, Uppsala, Sweden). A flow cell was activated by a N-(3-Dimethylaminopropyl)-N′-ethylcarbodiimide hydrochloride/N-Hydroxysuccinimide solution according to standard procedures. A solution of the fusion protein 1-27 CD3-Fc was added afterwards resulting in stable covalent linkage of the protein to the dextran layer of the Biacore chip. Unbound protein was removed by extensive washing followed by blocking of remaining unreacted NHS-activated carboxy groups by adding an ethanolamine solution. Success of protein coupling was confirmed by detection of a higher signal measured as Response Units compared to the signal prior to coupling. A reference cell was prepared as described but without adding the protein solution.

[0370] Purified bispecific single chain antibodies listed below were adjusted to 5 μg/ml with HBS-EP buffer (Biacore, Uppsala, Sweden) and transferred into a 96 well plate each at a volume of 150 μl.

[0371] Surface Plasmon Resonance Measurements were performed for all samples and the flow cells were regenerated with acetate buffer between measurements to release bound protein (all according to standard protocols).

[0372] Binding signals of the bispecific single chain antibodies were obtained by subtraction of the signal of the reference cell from the signal of the measurement cell conjugated with the 1-27 CD3-Fc protein.

[0373] Association and dissociation curves were measured as Response Units and recorded. The binding constants were calculated using the Biacore® curve-fitting software based on the Langmuir model. The calculated affinities for the tested fully cross-species specific bispecific single chain molecules to the N-terminal amino acids 1-27 of the human CD3 epsilon are given as KD values below and range from 2.54×10⁻⁶ M to 2.49×10⁻⁷ M. “LH” refers to an arrangement of variable domains in the order VL-VH. “HL” refers to an arrangement of variable domains in the order VH-VL. G4H, F70, A2J, E1L, E2M, H1E and F6A refer to different cross-species specific CD3 binding molecules.

| Bispecific antibody molecule | KD(M) |
|---|---|
| EGFR LH × F7O HLP | 1.01 × 10⁻⁶ |
| EGFR LH × A2J HLP | 2.49 × 10⁻⁷ |
| EGFR LH × E2M HLP | 2.46 × 10⁻⁶ |
| EGFR LH × H1E HLP | 2.54 × 10⁻⁶ |

### 12. Flow Cytometric Binding Analysis of the EGFR and CD3 Cross-Species Specific Bispecific Antibodies

[0374] In order to test the functionality of the cross-species specific bispecific antibody constructs with regard to binding capability to human and cynomolgus EGFR and CD3, respectively, a FACS analysis was performed. For this purpose CHO cells transfected with human EGFR as described in Example 8 and human CD3 positive T cell leukemia cell line HPB-ALL (DSMZ, Braunschweig, ACC483) were used to test the binding to human antigens. The binding reactivity to cynomolgus antigens was tested by using the generated cynomolgus EGFR transfectant described in Example 9 and a macaque T cell line 4119LnPx (kindly provided by Prof Fickenscher, Hygiene Institute, Virology, Erlangen-Nuernberg; published in Knappe A, et al., and Fickenscher H., Blood 2000, 95, 3256-61) 200.000 cells of the respective cell population were incubated for 30 min on ice with 50 μl of the purified protein of the cross-species specific bispecific antibody constructs (2 μg/ml). Alternatively, the cell culture supernatant of transiently produced proteins was used. The cells were washed twice in PBS and binding of the construct was detected with a murine Penta His antibody (Qiagen; diluted 1:20 in 50 μl PBS with 2% FCS). After washing, bound anti His antibodies were detected with an Fc gamma-specific antibody (Dianova) conjugated to phycoerythrin, diluted 1:100 in PBS with 2% FCS. Fresh culture medium was used as a negative control.

[0375] Flow cytometry was performed on a FACS-Calibur apparatus, the CellQuest software was used to acquire and analyze the data (Becton Dickinson biosciences, Heidelberg). FACS staining and measuring of the fluorescence intensity were performed as described in Current Protocols in Immunology (Coligan, Kruisbeek, Margulies, Shevach and Strober, Wiley-Interscience, 2002).

[0376] The binding ability of several bispecific single chain molecules which are specific for EGFR and cross-species specific for human and non-chimpanzee primate CD3 were clearly detectable as shown in FIG. 11. In the FACS analysis, all constructs showed binding to CD3 and EGFR compared to culture medium and first and second detection antibody as the negative controls. Cross-species specificity of the bispecific antibody to human and cynomolgus CD3 and EGFR antigens was demonstrated.

### 13. Bioactivity of EGFR and CD3 Cross-Species Specific Bispecific Single Chain Antibodies

[0377] Bioactivity of the generated bispecific single chain antibodies was analyzed by chromium 51 (⁵¹Cr) release in vitro cytotoxicity assays using the EGFR positive cell lines described in Examples 8 and 9. As effector cells stimulated human CD8 positive T cells or the macaque T cell line 4119LnPx were used, respectively.

[0378] Generation of the stimulated CD8+ T cells was performed as follows:

[0379] A Petri dish (145 mm diameter, Greiner) was pre-coated with a commercially available anti-CD3 specific antibody in a final concentration of 1 μg/ml for 1 hour at 37° C. Unbound protein was removed by one washing step with PBS. The fresh PBMC's were isolated from peripheral blood (30-50 ml human blood) by Ficoll gradient centrifugation according to standard protocols. 3-5×10⁷ PBMCs were added to the precoated petri dish in 120 ml of RPMI 1640/10% FCS/IL-2 20 U/ml (Proleukin, Chiron) and stimulated for 2 days. At the third day the cells were collected, washed once with RPMI 1640. IL-2 was added to a final concentration of 20 U/ml and cultivated again for one day. CD8+ cytotoxic T lymphocytes (CTLs) were isolated by depletion of CD4+ T cells and CD56+ NK cells.

[0380] Target cells were washed twice with PBS and labeled with 11.1 MBq ⁵¹Cr in a final volume of 100 μl RPMI with 50% FCS for 45 minutes at 37° C. Subsequently the labeled target cells were washed 3 times with 5 ml RPMI and then used in the cytotoxicity assay. The assay was performed in a 96 well plate in a total volume of 250 μl supplemented RPMI (as above) with an E:T ratio of 10:1. 1 μg/ml of the cross-species specific bispecific single chain antibody molecules and 20 threefold dilutions thereof were applied. Alternatively cell culture supernatant of transiently produced proteins was serially diluted in 1:2 steps. The assay time is 18 hours and cytotoxicity was measured as relative values of released chromium in the supernatant related to the difference of maximum lysis (addition of Triton-X) and spontaneous lysis (without effector cells). All measurements were done in quadruplicates. Measurement of chromium activity in the supernatants was performed with a Wizard 3″ gammacounter (Perkin Elmer Life Sciences GmbH, Köln, Germany). Analysis of the experimental data was performed with Prism 4 for Windows (version 4.02, GraphPad Software Inc., San Diego, Calif., USA). Sigmoidal dose response curves typically had R² values >0.90 as determined by the software. EC₅₀ values calculated by the analysis program were used for comparison of bioactivity.

[0381] As shown in FIGS. 12 and 13, all of the generated cross-species specific bispecific single chain antibody constructs revealed cytotoxic activity against human EGFR positive target cells elicited by human CD8+ cells and cynomolgus EGFR positive target cells elicited by the macaque T cell line 4119LnPx. A bispecific single chain antibody with different target specificity was used as negative control.

### 14. Cloning and Expression of the C-Terminal, Transmembrane and Truncated Extracellular Domains of Human MCSP

[0382] The coding sequence of the C-terminal, transmembrane and truncated extracellular domain of human MCSP (amino acids 1538-2322) was obtained by gene synthesis according to standard protocols (cDNA sequence and amino acid sequence of the recombinant construct for expression of the C-terminal, transmembrane and truncated extracellular domain of human MCSP (designated as human D3) are listed under SEQ ID NOs 374 and 373). The gene synthesis fragment was designed as to contain first a Kozak site to allow eukaryotic expression of the construct followed by the coding sequence of an 19 amino acid immunoglobulin leader peptide followed in frame by a FLAG tag, followed in frame by a sequence containing several restriction sites for cloning purposes and coding for a 9 amino acid artificial linker (SRTRSGSQL), followed in frame by the coding sequence of the C-terminal, transmembrane and truncated extracellular domain of human MCSP and a stop codon. Restriction sites were introduced at the beginning and at the end of the DNA fragment. The restriction sites EcoRI at the 5′ end and SalI at the 3′ end were used in the following cloning procedures. The fragment was digested with EcoRI and SalI and cloned into pEF-DHFR (pEF-DHFR is described in Mack et al. Proc. Natl. Acad. Sci. USA 92 (1995) 7021-7025) following standard protocols. A sequence verified plasmid was used to transfect CHO/dhfr− cells (ATCC No. CRL 9096). Cells were cultivated in RPMI 1640 with stabilized glutamine, supplemented with 10% FCS, 1% penicillin/streptomycin (all obtained from Biochrom AG Berlin, Germany) and nucleosides from a stock solution of cell culture grade reagents (Sigma-Aldrich Chemie GmbH, Taufkirchen, Germany) to a final concentration of 10 μg/ml Adenosine, 10 μg/ml Deoxyadenosine and 10 μg/ml Thymidine, in an incubator at 37° C., 95% humidity and 7% CO₂. Transfection was performed using the PolyFect Transfection Reagent (Qiagen GmbH, Hilden, Germany) and 5 μg of plasmid DNA according to the manufacturer's protocol. After cultivation for 24 hours cells were washed once with PBS and cultivated again in RPMI 1640 with stabilized glutamine and 1% penicillin/streptomycin. Thus the cell culture medium did not contain nucleosides and thereby selection was applied on the transfected cells. Approximately 14 days after transfection the outgrowth of resistant cells was observed. After an additional 7 to 14 days the transfectants were tested for expression of the construct by FACS analysis. 2.5×10⁵ cells were incubated with 50 μl of an anti-Flag-M2 antibody (Sigma-Aldrich Chemie GmbH, Taufkirchen, Germany) diluted to 5 μg/ml in PBS with 2% FCS. The binding of the antibody was detected with a R-Phycoerythrin-conjugated affinity purified F(ab′)2 fragment, goat anti-mouse IgG, Fc-gamma fragment specific diluted 1:100 in PBS with 2% FCS (ImmunoResearch Europe Ltd., Newmarket, Suffolk, UK). The samples were measured on a FACScalibur (BD biosciences, Heidelberg, Germany).

### 15. Cloning and Expression of the C-Terminal, Transmembrane and Truncated Extracellular Domains of Macaque MCSP

[0383] The cDNA sequence of the C-terminal, transmembrane and truncated extracellular domains of macaque MCSP (designated as macaque D3) was obtained by a set of three PCRs on macaque skin cDNA (Cat No. C1534218-Cy-BC; BioCat GmbH, Heidelberg, Germany) using the following reaction conditions: 1 cycle at 94° C., 3 min., 40 cycles with 94° C. for 0.5 min., 52° C. for 0.5 min. and 72° C. for 1.75 min., terminal cycle of 72° C. for 3 min. The following primers were used:

forward primer: 5′-GATCTGGTCTACACCATCGAGC-3′
reverse primer: 5′-GGAGCTGCTGCTGGCTCAGTGAGG-3′
forward primer: 5′-TTCCAGCTGAGCATGTCTGATGG-3′
reverse primer: 5′-CGATCAGCATCTGGGCCCAGG-3′
forward primer: 5′-GTGGAGCAGTTCACTCAGCAGGACC-3′
reverse primer: 5′-GCCTTCACACCCAGTACTGGCC-3′

[0384] Those PCRs generated three overlapping fragments (A: 1-1329, B: 1229-2428, C: 1782-2547) which were isolated and sequenced according to standard protocols using the PCR primers and thereby provided a 2547 bp portion of the cDNA sequence of macaque MCSP (the cDNA sequence and amino acid sequence of this portion of macaque MCSP are listed under SEQ ID NOs 376 and 375) from 74 bp upstream of the coding sequence of the C-terminal domain to 121 bp downstream of the stop codon. Another PCR using the following reaction conditions: 1 cycle at 94° C. for 3 min, 10 cycles with 94° C. for 1 min, 52° C. for 1 min and 72° C. for 2.5 min, terminal cycle of 72° C. for 3 min was used to fuse the PCR products of the aforementioned reactions A and B. The following primers are used:

forward primer:
5′-tcccgtacgagatctggatcccaattggatggcggactcgtgctgtt
ctcacacagagg-3′
reverse primer:
5′-agtgggtcgactcacacccagtactggccattcttaagggcagg
g-3′

[0385] The primers for this PCR were designed to introduce restriction sites at the beginning and at the end of the cDNA fragment coding for the C-terminal, transmembrane and truncated extracellular domains of macaque MCSP. The introduced restriction sites MfeI at the 5′ end and SalI at the 3′ end, were used in the following cloning procedures. The PCR fragment was then cloned via MfeI and SalI into a Bluescript plasmid containing the EcoRI/MfeI fragment of the aforementioned plasmid pEF-DHFR (pEF-DHFR is described in Raum et al. Cancer Immunol Immunother 50 (2001) 141-150) by replacing the C-terminal, transmembrane and truncated extracellular domains of human MCSP. The gene synthesis fragment contained the coding sequences of the immunoglobulin leader peptide and the Flag tag as well as the artificial linker (SRTRSGSQL) in frame to the 5′ end of the cDNA fragment coding for the C-terminal, transmembrane and truncated extracellular domains of macaque MCSP. This vector was used to transfect CHO/dhfr− cells (ATCC No. CRL 9096). Cells were cultivated in RPMI 1640 with stabilized glutamine supplemented with 10% FCS, 1% penicillin/streptomycin (all from Biochrom AG Berlin, Germany) and nucleosides from a stock solution of cell culture grade reagents (Sigma-Aldrich Chemie GmbH, Taufkirchen, Germany) to a final concentration of 10 μg/ml Adenosine, 10 μg/ml Deoxyadenosine and 10 μg/ml Thymidine, in an incubator at 37° C., 95% humidity and 7% CO2. Transfection was performed with PolyFect Transfection Reagent (Qiagen GmbH, Hilden, Germany) and 5 μg of plasmid DNA according to the manufacturer's protocol. After cultivation for 24 hours cells were washed once with PBS and cultivated again in RPMI 1640 with stabilized glutamine and 1% penicillin/streptomycin. Thus the cell culture medium did not contain nucleosides and thereby selection was applied on the transfected cells. Approximately 14 days after transfection the outgrowth of resistant cells is observed. After an additional 7 to 14 days the transfectants were tested for expression of the recombinant construct via FACS. 2.5×10⁵ cells were incubated with 50 μl of an anti-Flag-M2 antibody (Sigma-Aldrich Chemie GmbH, Taufkirchen, Germany) diluted to 5 μg/ml in PBS with 2% FCS. Bound antibody was detected with a R-Phycoerythrin-conjugated affinity purified F(ab′)2 fragment, goat anti-mouse IgG, Fc-gamma fragment specific, diluted 1:100 in PBS with 2% FCS (Jackson ImmunoResearch Europe Ltd., Newmarket, Suffolk, UK). Samples were measured on a FACScalibur (BD biosciences, Heidelberg, Germany).

### 16. Generation and Characterisation of MCSP and CD3 Cross-Species Specific Bispecific Single Chain Molecules

[0386] Bispecific single chain antibody molecules each comprising a binding domain cross-species specific for human and non-chimpanzee primate CD3 epsilon as well as a binding domain cross-species-specific for human and non-chimpanzee primate MCSP, are designed as set out in the following Table 2:

TABLE 2
Formats of MCSP and CD3 cross-species specific bispecific
single chain antibodies

| SEQ ID | Formats of protein constructs |
|---|---|
| (nucl/prot) | (N → C) |
| 310/309 | MCSP-G4 HL × H2C HL |
| 312/311 | MCSP-G4 HL × F12Q HL |
| 314/313 | MCSP-G4 HL × I2C HL |
| 316/315 | MCSP-G4 HLP × F6A HLP |
| 318/317 | MCSP-G4 HLP × H2C HLP |
| 322/321 | MCSP-G4 HLP × G4H HLP |
| 326/325 | MCSP-G4 HLP × E1L HLP |
| 328/327 | MCSP-G4 HLP × E2M HLP |
| 332/331 | MCSP-G4 HLP × F12Q HL |
| 334/333 | MCSP-G4 HLP × I2C HL |
| 336/335 | MCSP-D2 HL × H2C HL |
| 338/337 | MCSP-D2 HL × F12Q HL |
| 340/339 | MCSP-D2 HL × I2C HL |
| 342/341 | MCSP-D2 HLP × H2C HLP |
| 344/343 | MCSP-F9 HL × H2C HL |
| 346/345 | MCSP-F9 HLP × H2C HLP |
| 348/347 | MCSP-F9 HLP × G4H HLP |

[0387] The aforementioned constructs containing the variable heavy-chain (VH) and variable light-chain (VL) domains cross-species specific for human and macaque MCSP D3 and the VH and VL domains cross-species specific for human and macaque CD3 were obtained by gene synthesis. The gene synthesis fragments were designed as to contain first a Kozak site for eukaryotic expression of the construct, followed by a 19 amino acid immunoglobulin leader peptide, followed in frame by the coding sequence of the respective bispecific single chain antibody molecule, followed in frame by the coding sequence of a histidine₆-tag and a stop codon. The gene synthesis fragment was also designed as to introduce suitable N- and C-terminal restriction sites. The gene synthesis fragment was cloned via these restriction sites into a plasmid designated pEF-DHFR (pEF-DHFR is described in Raum et al. Cancer Immunol Immunother 50 (2001) 141-150) according to standard protocols (Sambrook, Molecular Cloning; A Laboratory Manual, 3rd edition, Cold Spring Harbour Laboratory Press, Cold Spring Harbour, N.Y. (2001)). The constructs were transfected stably or transiently into DHFR-deficient CHO-cells (ATCC No. CRL 9096) by electroporation or alternatively into HEK 293 (human embryonal kidney cells, ATCC Number: CRL-1573) in a transient manner according to standard protocols.

[0388] Eukaryotic protein expression in DHFR deficient CHO cells was performed as described by Kaufmann R. J. (1990) Methods Enzymol. 185, 537-566. Gene amplification of the constructs was induced by addition of increasing concentrations of methothrexate (MTX) up to final concentrations of 20 nM MTX. After two passages of stationary culture the cells were grown in roller bottles with nucleoside-free HyQ PF CHO liquid soy medium (with 4.0 mM L-Glutamine with 0.1% Pluronic F—68; HyClone) for 7 days before harvest. The cells were removed by centrifugation and the supernatant containing the expressed protein is stored at −20° C.

[0389] Äkta® Explorer System (GE Health Systems) and Unicorn® Software were used for chromatography. Immobilized metal affinity chromatography (“IMAC”) was performed using a Fractogel EMD Chelate® (Merck) which was loaded with ZnCl₂ according to the protocol provided by the manufacturer. The column was equilibrated with buffer A (20 mM sodium phosphate buffer pH 7.2, 0.1 M NaCl) and the cell culture supernatant (500 ml) was applied to the column (10 ml) at a flow rate of 3 ml/min. The column was washed with buffer A to remove unbound sample. Bound protein was eluted using a two step gradient of buffer B (20 mM sodium phosphate buffer pH 7.2, 0.1 M NaCl, 0.5 M Imidazole) according to the following:

[0390] Step 1: 20% buffer B in 6 column volumes

[0391] Step 2: 100% buffer B in 6 column volumes

[0392] Eluted protein fractions from step 2 were pooled for further purification. All chemicals are of research grade and purchased from Sigma (Deisenhofen) or Merck (Darmstadt).

[0393] Gel filtration chromatography was performed on a HiLoad 16/60 Superdex 200 prep grade column (GE/Amersham) equilibrated with Equi-buffer (25 mM Citrate, 200 mM Lysine, 5% Glycerol, pH 7.2). Eluted protein samples (flow rate 1 ml/min) were subjected to standard SDS-PAGE and Western Blot for detection. Prior to purification, the column was calibrated for molecular weight determination (molecular weight marker kit, Sigma MW GF-200). Protein concentrations were determined using OD280 nm.

[0394] Purified bispecific single chain antibody protein was analyzed in SDS PAGE under reducing conditions performed with pre-cast 4-12% Bis Tris gels (Invitrogen). Sample preparation and application were performed according to the protocol provided by the manufacturer. The molecular weight was determined with MultiMark protein standard (Invitrogen). The gel was stained with colloidal Coomassie (Invitrogen protocol). The purity of the isolated protein is >95% as determined by SDS-PAGE.

[0395] The bispecific single chain antibody has a molecular weight of about 52 kDa under native conditions as determined by gel filtration in phosphate buffered saline (PBS). All constructs were purified according to this method.

[0396] Western Blot was performed using an Optitran® BA-S83 membrane and the Invitrogen Blot Module according to the protocol provided by the manufacturer. For detection of the bispecific single chain antibody protein antibodies an anti-His Tag antibody was used (Penta His, Qiagen). A Goat-anti-mouse Ig antibody labeled with alkaline phosphatase (AP) (Sigma) was used as secondary antibody and BCIP/NBT (Sigma) as substrate. A single band was detected at 52 kD corresponding to the purified bispecific single chain antibody.

[0397] Alternatively, constructs were transiently expressed in DHFR deficient CHO cells. In brief, 4×105 cells per construct were cultivated in 3 ml RPMI 1640 all medium with stabilized glutamine supplemented with 10% fetal calf serum, 1% penicillin/streptomycin and nucleosides from a stock solution of cell culture grade reagents (Sigma-Aldrich Chemie GmbH, Taufkirchen, Germany) to a final concentration of 10 μg/ml Adenosine, 10 μg/ml Deoxyadenosine and 10 μg/ml Thymidine, in an incubator at 37° C., 95% humidity and 7% CO2 one day before transfection. Transfection was performed with Fugene 6 Transfection Reagent (Roche, #11815091001) according to the manufacturer's protocol. 94 μl OptiMEM medium (Invitrogen) and 6 μl Fugene 6 are mixed and incubated for 5 minutes at room temperature. Subsequently, 1.5 μg DNA per construct were added, mixed and incubated for 15 minutes at room temperature. Meanwhile, the DHFR deficient CHO cells were washed with 1×PBS and resuspended in 1.5 ml RPMI 1640 all medium. The transfection mix was diluted with 600 μl RPMI 1640 all medium, added to the cells and incubated overnight at 37° C., 95% humidity and 7% CO2. The day after transfection the incubation volume of each approach was extended to 5 ml RPMI 1640 all medium. Supernatant was harvested after 3 days of incubation.

### 17. Flow Cytometric Binding Analysis of the MCSP and CD3 Cross-Species Specific Bispecific Antibodies

[0398] In order to test the functionality of the cross-species specific bispecific antibody constructs regarding the capability to bind to human and macaque MCSP D3 and CD3, respectively, a FACS analysis was performed. For this purpose CHO cells transfected with human MCSP D3 (as described in Example 14) and the human CD3 positive T cell leukemia cell line HPB-ALL (DSMZ, Braunschweig, ACC483) were used to test the binding to human antigens. The binding reactivity to macaque antigens was tested by using the generated macaque MCSP D3 transfectant (described in Example 15) and a macaque T cell line 4119LnPx (kindly provided by Prof. Fickenscher, Hygiene Institute, Virology, Erlangen-Nuernberg; published in Knappe A, et al., and Fickenscher H., Blood 2000, 95, 3256-61). 200.000 cells of the respective cell lines were incubated for 30 min on ice with 50 μl of the purified protein of the cross-species specific bispecific antibody constructs (2 μg/ml) or cell culture supernatant of transfected cells expressing the cross-species specific bispecific antibody constructs. The cells were washed twice in PBS with 2% FCS and binding of the construct was detected with a murine anti-His antibody (Penta His antibody; Qiagen; diluted 1:20 in 50 μl PBS with 2% FCS). After washing, bound anti-His antibodies were detected with an Fc gamma-specific antibody (Dianova) conjugated to phycoerythrin, diluted 1:100 in PBS with 2% FCS. Supernatant of untransfected CHO cells was used as negative control for binding to the T cell lines. A single chain construct with irrelevant target specificity was used as negative control for binding to the MCSP-D3 transfected CHO cells.

[0399] Flow cytometry was performed on a FACS-Calibur apparatus; the CellQuest software was used to acquire and analyze the data (Becton Dickinson biosciences, Heidelberg). FACS staining and measuring of the fluorescence intensity were performed as described in Current Protocols in Immunology (Coligan, Kruisbeek, Margulies, Shevach and Strober, Wiley-Interscience, 2002).

[0400] The bispecific binding of the single chain molecules listed above, which are cross-species specific for MCSP D3 and cross-species specific for human and macaque CD3 was clearly detectable as shown in FIGS. 14, 15, 16 and 58. In the FACS analysis all constructs showed binding to CD3 and MCSP D3 as compared to the respective negative controls. Cross-species specificity of the bispecific antibodies to human and macaque CD3 and MCSP D3 antigens was demonstrated.

### 18. Bioactivity of MCSP and CD3 Cross-Species Specific Bispecific Single Chain Antibodies

[0401] As shown in FIGS. 17 to 21, all of the generated cross-species specific bispecific single chain antibody constructs revealed cytotoxic activity against human MSCP positive target cells elicited by human CD8+ cells and cynomolgus MSCP positive target cells elicited by the macaque T cell line 4119LnPx. A bispecific single chain antibody with different target specificity is used as negative control.

### 19. Plasma Stability of MCSP and CD3 Cross-Species Specific Bispecific Single Chain Antibodies

[0402] Stability of the generated bispecific single chain antibodies in human plasma was analyzed by incubation of the bispecific single chain antibodies in 50% human Plasma at 37° C. and 4° C. for 24 hours and subsequent testing of bioactivity. Bioactivity was studied in a chromium 51 (⁵¹Cr) release in vitro cytotoxicity assay using a MCSP positive CHO cell line (expressing MCSP as cloned according to example 14 or 15) as target and stimulated human CD8 positive T cells as effector cells.

[0403] EC₅₀ values calculated by the analysis program as described above are used for comparison of bioactivity of bispecific single chain antibodies incubated with 50% human plasma for 24 hours at 37° C. and 4° C. respectively with bispecific single chain antibodies without addition of plasma or mixed with the same amount of plasma immediately prior to the assay.

[0404] As shown in FIG. 22 and Table 3 the bioactivity of the G4 H-L×I2C H-L, G4 H-L×H2C H-L and G4 H-L×F12Q H-L bispecific antibodies was not significantly reduced as compared with the controls without the addition of plasma or with addition of plasma immediately before testing of bioactivity.

TABLE 3
bioactivity of the bispecific antibodies without or with the
addition of Plasma

| | Without | With | Plasma | Plasma |
|---|---|---|---|---|
| Construct | plasma | plasma | 37° C. | 4° C. |
| G4 H-L × | 300 | 796 | 902 | 867 |
| I2C H-L | | | | |
| G4 H-L × | 496 | 575 | 2363 | 1449 |
| H2C H-L | | | | |
| G4 H-L × | 493 | 358 | 1521 | 1040 |
| F12Q H-L | | | | |

### 20. Generation of Human EGFR and CD3 Cross-Species Specific Bispecific Single Chain Molecules

[0405] Bispecific single chain antibody molecules with a binding domain cross-species specific for human and cynomolgus CD3 as well as a binding domain cross-species-specific for human EGFR, are designed as set out in the following Table 4:

TABLE 4
Formats of EGFR and CD3 cross-species specific bispecific
single chain antibodies

| SEQ ID | Formats of protein constructs |
|---|---|
| (nucl/prot) | (N → C) |
| 390/389 | EGFR H-L × I2C H L |
| 392/391 | EGFR L-H × I2C H L |
| 394/393 | EGFR H-L × F12Q H L |
| 396/395 | EGFR L-H × F12Q H L |
| 398/397 | EGFR H-L × H2C H L |
| 400/399 | EGFR L-H × H2C H L |
| 448/447 | EGFR HL × H2C HL |
| 450/449 | EGFR HL × F12Q LH |
| 452/451 | EGFR HL × I2C HL |

[0406] The aforementioned constructs containing the variable light-chain (L) and variable heavy-chain (H) domains cross-species specific for human and cynomolgus EGFR were obtained by gene synthesis. The gene synthesis fragments were designed as to contain first a Kozak site for eukaryotic expression of the construct, followed by a 19 amino acid immunoglobulin leader peptide, followed in frame by the coding sequence of the respective bispecific single chain antibody molecule, followed in frame by the coding sequence of a 6 histidine tag and a stop codon.

[0407] The gene synthesis fragment was also designed as to introduce suitable N- and C-terminal restriction sites. The gene synthesis fragment was cloned via these restriction sites into a plasmid designated pEF-DHFR (pEF-DHFR is described in Raum et al. Cancer Immunol Immunother 50 (2001) 141-150) according to standard protocols (Sambrook, Molecular Cloning; A Laboratory Manual, 3rd edition, Cold Spring Harbour Laboratory Press, Cold Spring Harbour, N.Y. (2001)). The constructs were stably transfected into DHFR-deficient CHO-cells (ATCC No. CRL 9096) as well as produced and purified as described in example 10.

### 21. Generation of Human EGFR and CD3 Cross-Species Specific Bispecific Single Chain Molecules

[0408] Bispecific single chain antibody molecules with a binding domain cross-species specific for human and cynomolgus CD3 as well as a binding domain cross-species-specific for human EGFR, are designed as set out in the following Table 5:

TABLE 5
Formats of EGFR and CD3 cross-species specific bispecific
single chain antibodies

| SEQ ID | Formats of protein constructs |
|---|---|
| (nucl/prot) | (N → C) |
| 410/4099 | EGFR H-L × I2C H L |
| 412/411 | EGFR L-H × I2C H L |
| 414/413 | EGFR H-L × F12Q H L |
| 416/415 | EGFR L-H × F12Q H L |
| 418/417 | EGFR H-L × H2C H L |
| 420/419 | EGFR L-H × H2C H L |

[0409] The aforementioned constructs containing the variable light-chain (L) and variable heavy-chain (H) domains cross-species specific for human and cynomolgus EGFR were obtained by gene synthesis. The gene synthesis fragments were designed as to contain first a Kozak site for eukaryotic expression of the construct, followed by a 19 amino acid immunoglobulin leader peptide, followed in frame by the coding sequence of the respective bispecific single chain antibody molecule, followed in frame by the coding sequence of a 6 histidine tag and a stop codon.

[0410] The gene synthesis fragment was also designed as to introduce suitable N- and C-terminal restriction sites. The gene synthesis fragment was cloned via these restriction sites into a plasmid designated pEF-DHFR (pEF-DHFR is described in Raum et al. Cancer Immunol Immunother 50 (2001) 141-150) according to standard protocols (Sambrook, Molecular Cloning; A Laboratory Manual, 3rd edition, Cold Spring Harbour Laboratory Press, Cold Spring Harbour, N.Y. (2001)). The constructs were stably transfected into DHFR-deficient CHO-cells (ATCC No. CRL 9096) as well as produced and purified as described in example 10.

### 22. Generation of Human HER2/Neu and CD3 Cross-Species Specific Bispecific Single Chain Molecules

[0411] Bispecific single chain antibody molecules with a binding domain cross-species specific for human and cynomolgus CD3 as well as a binding domain cross-species-specific for human Her2/neu, are designed as set out in the following Table 6:

TABLE 6
Formats of Her2/neu and CD3 cross-species specific bispecific
single chain antibodies

| SEQ ID | Formats of protein constructs |
|---|---|
| (nucl/prot) | (N → C) |
| 430/439 | HER2/neu VH-VL × I2C VH VL |
| 432/431 | HER2/neu VL-VH × I2C VH VL |
| 434/433 | HER2/neu VH-VL × F12Q VH VL |
| 436/435 | HER2/neu VL-VH × F12Q VH VL |
| 438/437 | HER2/neu VH-VL × H2C VH VL |
| 440/439 | HER2/neu VL-VH × H2C VH VL |

[0412] The aforementioned constructs containing the variable light-chain (L) and variable heavy-chain (H) domains cross-species specific for human and cynomolgus HER2/neu were obtained by gene synthesis. The gene synthesis fragments were designed as to contain first a Kozak site for eukaryotic expression of the construct, followed by a 19 amino acid immunoglobulin leader peptide, followed in frame by the coding sequence of the respective bispecific single chain antibody molecule, followed in frame by the coding sequence of a 6 histidine tag and a stop codon.

[0413] The gene synthesis fragment was also designed as to introduce suitable N- and C-terminal restriction sites. The gene synthesis fragment was cloned via these restriction sites into a plasmid designated pEF-DHFR (pEF-DHFR is described in Raum et al. Cancer Immunol Immunother 50 (2001) 141-150) according to standard protocols (Sambrook, Molecular Cloning; A Laboratory Manual, 3rd edition, Cold Spring Harbour Laboratory Press, Cold Spring Harbour, N.Y. (2001)). The constructs were stably transfected into DHFR-deficient CHO-cells (ATCC No. CRL 9096) as well as produced and purified as described in example 10.

[0414] 23.1. Generation of CHO Cells Expressing Human HER2

[0415] The coding sequence of human HER2 as published in GenBank (Accession number X03363) is obtained by gene synthesis according to standard protocols. The gene synthesis fragment is designed as to contain the coding sequence of the human HER2 protein including its leader peptide (the cDNA and amino acid sequence of the construct is listed under SEQ ID Nos 459 and 460). The gene synthesis fragment is also designed as to introduce restriction sites at the beginning and at the end of the fragment. The introduced restriction sites, XbaI at the 5′ end and SalI at the 3′ end, are utilised in the following cloning procedures. The gene synthesis fragment is cloned via XbaI and Sail into a plasmid designated pEFDHFR (pEFDHFR is described in Raum et al. Cancer Immunol Immunother 50 (2001) 141-150) following standard protocols. The aforementioned procedures are carried out according to standard protocols (Sambrook, Molecular Cloning; A Laboratory Manual, 3rd edition, Cold Spring Harbour Laboratory Press, Cold Spring Harbour, N.Y. (2001)). A clone with sequence-verified nucleotide sequence is transfected into DHFR deficient CHO cells for eukaryotic expression of the construct. Eukaryotic protein expression in DHFR deficient CHO cells is performed as described by Kaufmann R. J. (1990) Methods Enzymol. 185, 537-566. Gene amplification of the construct is induced by increasing concentrations of methotrexate (MTX) to a final concentration of up to 20 nM MTX.

[0416] 23.2. Generation of CHO Cells Expressing the Extracellular Domain of Macaque Her2

[0417] The coding sequence of human Her2 as described above is modified to encode the amino acids 123 to 1038 of the macaque Her2 protein as published in GenBank (Accession number XP_{—}001090430). The coding sequence for this chimeric protein is obtained by gene synthesis according to standard protocols (the cDNA and amino acid sequence of the construct is listed under SEQ ID Nos 461 and 462). The gene synthesis fragment is also designed as to contain a Kozak site for eukaryotic expression of the construct and restriction sites at the beginning and the end of the fragment. The introduced restriction sites XbaI at the 5′ end and SalI at the 3′ end, are utilized in the following cloning procedures. The gene synthesis fragment is then cloned via XbaI and SalI into a plasmid designated pEFDHFR (pEFDHFR is described in Raum et al. Cancer Immunol Immunother 50 (2001) 141-150). A sequence verified clone of this plasmid is used to transfect CHO/dhfr− cells as described above.

[0418] 23.3. Generation of HER2 and CD3 Cross-Species Specific Bispecific Single Chain Molecules

[0419] 3.1. Cloning of Cross-Species Specific Binding Molecules

[0420] Generally, bispecific single chain antibody molecules, each comprising a domain with a binding specificity cross-species specific for human and macaque CD3epsilon as well as a domain with a binding specificity cross-species specific for human and macaque HER2, are designed as set out in the following Table 7:

TABLE 7
Formats of anti-CD3 and anti-HER2 cross-species specific
bispecific single chain antibody molecules

| SEQ ID | Formats of protein constructs |
|---|---|
| (nucl/prot) | (N → C) |
| 432/431 | Her2 LH × I2C HL |
| 436/435 | Her2 LH × F12Q HL |
| 440/439 | Her2 LH × H2C HL |
| 430/429 | Her2 HL × I2C HL |
| 434/433 | Her2 HL × F12Q HL |
| 438/437 | Her2 HL × H2C HL |
| 480/479 | I2C HL × Her2 LH |
| 478/477 | F12Q HL × Her2 LH |
| 476/475 | H2C HL × Her2 LH |

[0421] The aforementioned constructs containing the variable light-chain (L) and variable heavy-chain (H) domains cross-species specific for human and macaque HER2 and the CD3 specific VH and VL combinations cross-species specific for human and macaque CD3 are obtained by gene synthesis. The gene synthesis fragments are designed as to contain first a Kozak site for eukaryotic expression of the construct, followed by a 19 amino acid immunoglobulin leader peptide, followed in frame by the coding sequence of the respective bispecific single chain antibody molecule, followed in frame by the coding sequence of a 6 histidine tag and a stop codon. The gene synthesis fragment is also designed as to introduce suitable restriction sites at the beginning and at the end of the fragment. The introduced restriction sites are utilised in the following cloning procedures. The gene synthesis fragment is cloned via these restriction sites into a plasmid designated pEFDHFR (pEFDHFR is described in Raum et al. Cancer Immunol Immunother 50 (2001) 141-150) following standard protocols. The aforementioned procedures are carried out according to standard protocols (Sambrook, Molecular Cloning; A Laboratory Manual, 3rd edition, Cold Spring Harbour Laboratory Press, Cold Spring Harbour, N.Y. (2001)). A clone with sequence-verified nucleotide sequence is transfected into DHFR deficient CHO cells for eukaryotic expression of the construct. Eukaryotic protein expression in DHFR deficient CHO cells is performed as described by Kaufmann R. J. (1990) Methods Enzymol. 185, 537-566. Gene amplification of the construct is induced by increasing concentrations of methothrexate (MTX) to a final concentration of up to 20 nM MTX.

[0422] 3.2. Expression and Purification of the Bispecific Single Chain Antibody Molecules

[0423] The bispecific single chain antibody molecules are expressed in Chinese hamster ovary cells (CHO). Eukaryotic protein expression in DHFR deficient CHO cells is performed as described by Kaufmann R. J. (1990) Methods Enzymol. 185, 537-566. Gene amplification of the constructs is induced by addition of increasing concentrations of MTX up to final concentrations of 20 nM MTX. After two passages of stationary culture the cells are grown in roller bottles with nucleoside-free HyQ PF CHO liquid soy medium (with 4.0 mM L-Glutamine with 0.1% Pluronic F—68; HyClone) for 7 days before harvest. The cells are removed by centrifugation and the supernatant containing the expressed protein is stored at −80° C. Transfection is performed with 293fectin reagent (Invitrogen, #12347-019) according to the manufacturer's protocol.

[0424] Äkta® Explorer System (GE Health Systems) and Unicorn® Software are used for chromatography. Immobilized metal affinity chromatography (“IMAC”) is performed using a Fractogel EMD Chelate® (Merck) which is loaded with ZnCl₂ according to the protocol provided by the manufacturer. The column is equilibrated with buffer A (20 mM sodium phosphate buffer pH 7.2, 0.1 M NaCl) and the cell culture supernatant (500 ml) is applied to the column (10 ml) at a flow rate of 3 ml/min. The column is washed with buffer A to remove unbound sample. Bound protein is eluted using a two step gradient of buffer B (20 mM sodium phosphate buffer pH 7.2, 0.1 M NaCl, 0.5 M Imidazole) according to the following:

[0425] Step 1: 20% buffer B in 6 column volumes

[0426] Step 2: 100% buffer B in 6 column volumes

[0427] Eluted protein fractions from step 2 are pooled for further purification. All chemicals are of research grade and purchased from Sigma (Deisenhofen) or Merck (Darmstadt).

[0428] Gel filtration chromatography is performed on a HiLoad 16/60 Superdex 200 prep grade column (GE/Amersham) equilibrated with Equi-buffer (25 mM Citrate, 200 mM Lysine, 5% Glycerol, pH 7.2). Eluted protein samples (flow rate 1 ml/min) are subjected to standard SDS-PAGE and Western Blot for detection. Prior to purification, the column is calibrated for molecular weight determination (molecular weight marker kit, Sigma MW GF-200). Protein concentrations are determined using OD280 nm.

[0429] Purified bispecific single chain antibody protein is analyzed in SDS PAGE under reducing conditions performed with pre-cast 4-12% Bis Tris gels (Invitrogen). Sample preparation and application are performed according to the protocol provided by the manufacturer. The molecular weight is determined with MultiMark protein standard (Invitrogen). The gel is stained with colloidal Coomassie (Invitrogen protocol). The purity of the isolated protein is >95% as determined by SDS-PAGE.

[0430] The bispecific single chain antibody has a molecular weight of about 52 kDa under native conditions as determined by gel filtration in PBS. All constructs are purified according to this method.

[0431] Western Blot is performed using an Optitran® BA-S83 membrane and the Invitrogen Blot Module according to the protocol provided by the manufacturer. For detection of the bispecific single chain antibody protein antibodies an anti-His Tag antibody is used (Penta His, Qiagen). A Goat-anti-mouse Ig antibody labeled with alkaline phosphatase (AP) (Sigma) is used as secondary antibody and BCIP/NBT (Sigma) as substrate. A single band is detected at 52 kD corresponding to the purified bispecific single chain antibody.

[0432] 23.4. Flow Cytometric Binding Analysis of the HER2 and CD3 Cross-Species Specific Bispecific Antibodies

[0433] In order to test the functionality of the cross-species specific bispecific antibody constructs regarding the capability to bind to human and macaque HER2 and CD3, respectively, a FACS analysis is performed. For this purpose CHO cells transfected with human HER2 as described in Example 23.1 and the human CD3 positive T cell leukemia cell line HPB-ALL (DSMZ, Braunschweig, ACC483) are used to test the binding to human antigens. The binding reactivity to macaque antigens is tested by using the generated macaque HER2 transfectant described in Example 23.2 and a macaque T cell line 4119LnPx (kindly provided by Prof. Fickenscher, Hygiene Institute, Virology, Erlangen-Nuernberg; published in Knappe A, et al., and Fickenscher H., Blood 2000, 95, 3256-61). 200.000 cells of the respective cell lines are incubated for 30 min on ice with 50 μl of the purified protein of the cross-species specific bispecific antibody constructs (2 μg/ml). The cells are washed twice in PBS with 2% FCS and binding of the construct is detected with a murine anti-His antibody (Penta His antibody; Qiagen; diluted 1:20 in 50 μl PBS with 2% FCS). After washing, bound anti-His antibodies are detected with an Fc gamma-specific antibody (Dianova) conjugated to phycoerythrin, diluted 1:100 in PBS with 2% FCS. PBS with 2% FCS is used as negative control for binding to the T cell lines as well as to the HER2 transfected CHO cells.

[0434] Flow cytometry is performed on a FACS-Calibur apparatus; the CellQuest software is used to acquire and analyze the data (Becton Dickinson biosciences, Heidelberg). FACS staining and measuring of the fluorescence intensity are performed as described in Current Protocols in Immunology (Coligan, Kruisbeek, Margulies, Shevach and Strober, Wiley-Interscience, 2002).

[0435] The bispecific binding of the single chain molecules listed above, which are cross-species specific for HER2 and cross-species specific for human and non-chimpanzee primate CD3 is clearly detectable as shown in FIG. 23. In the FACS analysis all constructs show binding to CD3 and HER2 as compared to the respective negative controls. Cross-species specificity of the bispecific antibodies to human and macaque CD3 and HER2 antigens is demonstrated.

[0436] 23.5. Bioactivity of HER2 and CD3 Cross-Species Specific Bispecific Single Chain Antibodies

[0437] Bioactivity of the generated bispecific single chain antibodies is analyzed by chromium 51 (⁵¹Cr) release in vitro cytotoxicity assays using the HER2 positive cell lines described in Examples 23.1 and 23.2. As effector cells stimulated human CD4/CD56 depleted PBMC or the macaque T cell line 4119LnPx are used as specified in the respective figures.

[0438] Generation of the stimulated CD4/CD56 depleted PBMC is performed as follows: A Petri dish (85 mm diameter, Nunc) is coated with a commercially available anti-CD3 specific antibody (e.g. OKT3, Othoclone) in a final concentration of 1 μg/ml for 1 hour at 37° C. Unbound protein is removed by one washing step with PBS. The fresh PBMC are isolated from peripheral blood (30-50 ml human blood) by Ficoll gradient centrifugation according to standard protocols. 3-5×10⁷ PBMC are added to the precoated petri dish in 50 ml of RPMI 1640 with stabilized glutamine/10% FCS/IL-2 20 U/ml (Proleukin, Chiron) and stimulated for 2 days. On the third day the cells are collected and washed once with RPMI 1640. IL-2 is added to a final concentration of 20 U/ml and the cells are cultivated again for one day in the same cell culture medium as above. By depletion of CD4+ T cells and CD56+ NK cells according to standard protocols CD8+ cytotoxic T lymphocytes (CTLs) are enriched. Target cells are washed twice with PBS and labelled with 11.1 MBq ⁵¹Cr in a final volume of 100 μl RPMI with 50% FCS for 45 minutes at 37° C. Subsequently the labelled target cells are washed 3 times with 5 ml RPMI and then used in the cytotoxicity assay. The assay is performed in a 96 well plate in a total volume of 250 μl supplemented RPMI (as above) with E:T ratios of 1:1 or 10:1, which are specified in the respective figures. 1 μg/ml of the cross-species specific bispecific single chain antibody molecules and 15-21 fivefold dilutions thereof are applied. The assay time is 18 hours and cytotoxicity is measured as relative values of released chromium in the supernatant related to the difference of maximum lysis (addition of Triton-X) and spontaneous lysis (without effector cells). All measurements are done in quadruplicates. Measurement of chromium activity in the supernatants is performed with a Wizard 3″ gamma counter (Perkin Elmer Life Sciences GmbH, Köln, Germany). Analysis of the experimental data is performed with Prism 4 for Windows (version 4.02, GraphPad Software Inc., San Diego, Calif., USA). Sigmoidal dose response curves typically have R² values >0.90 as determined by the software. EC₅₀ values calculated by the analysis program are used for comparison of bioactivity.

[0439] As shown in FIG. 24 cross-species specific bispecific single chain antibody constructs demonstrate cytotoxic activity against human HER2 positive target cells elicited by stimulated human CD4/CD56 depleted PBMC and against macaque HER2 positive target cells elicited by the macaque T cell line 4119LnPx.

### Example 24

### Cloning and Expression of the Human and Macaque Membrane Bound Form of IgE

[0440] The mouse cell line J558L (obtained from Interlab Project, Istituto Nazionale per la Ricerca sul Cancro, Genova, Italy, ECACC 88032902), a spontaneous heavy chain-loss-variant myeloma cell line that synthesizes and secretes a lambda light chain, was used to be complemented by a membrane bound heavy chain variant of the human and macaque IgE, respectively. In order to generate such constructs synthetic molecules were obtained by gene synthesis according to standard protocols (the nucleotide sequences of the constructs are listed under SEQ ID Nos 507 and 508). In these constructs the coding sequence for human and macaque c epsilon chain was fused to the human transmembrane region of IgE, respectively. The built in specificity of the VH chain is directed against the hapten (4-hydroxy-3-nitro-phenyl)acetyl) (NP). The gene synthesis fragment was also designed as to contain a Kozak site for eukaryotic expression of the construct and an immunoglobulin leader and restriction sites at the beginning and the end of the DNA. The introduced restriction sites EcoRI at the 5′ end and SalI at the 3′ end were utilised during the cloning step into the expression plasmid designated pEFDHFR. After sequence verification (macaque: XM_{—}001116734 macaca mulatta Ig epsilon C region, mRNA; human: NC_{—}000014 Homo sapiens chromosome 14, complete sequence, National Center for Biotechnology Information, http://www.ncbi.nlm.nih.gov/entrez) the plasmids were used to transfect CHO/dhfr-cells as described above. Eukaryotic protein expression in DHFR deficient CHO cells is performed as described by Kaufmann R. J. (1990) Methods Enzymol. 185, 537-566. Gene amplification of the construct is induced by increasing concentrations of methothrexate (MTX) to a final concentration of up to 20 nM MTX.

### Example 25

### Generation of IgE and CD3 Cross-Species Specific Bispecific Single Chain Molecules

[0441] Generally, bispecific single chain antibody molecules, each comprising a domain with a binding specificity for the human and the cynomolgus CD3 antigen as well as a domain with a binding specificity for the human and the macaque IgE antigen, were designed as set out in the following Table 8:

TABLE 8
Formats of anti-CD3 and anti-IgE cross-species specific bispecific
single chain antibody molecules

| SEQ ID | Formats of protein constructs |
|---|---|
| (nucl/prot) | (N → C) |
| 496/495 | IgE HL × H2C HL |
| 498/497 | IgE HL × F12Q HL |
| 500/499 | IgE HL × I2C HL |
| 502/501 | IgE LH × H2C HL |
| 504/503 | IgE LH × F12Q HL |
| 506/505 | IgE LH × I2C HL |

[0442] The aforementioned constructs containing the variable light-chain (L) and variable heavy-chain (H) domains cross-species specific for human and macaque IgE and the CD3 specific VH and VL combinations cross-species specific for human and macaque CD3 are obtained by gene synthesis. The gene synthesis fragments are designed as to contain first a Kozak site for eukaryotic expression of the construct, followed by a 19 amino acid immunoglobulin leader peptide, followed in frame by the coding sequence of the respective bispecific single chain antibody molecule, followed in frame by the coding sequence of a 6 histidine tag and a stop codon. The gene synthesis fragment is also designed as to introduce suitable restriction sites at the beginning and at the end of the fragment. The introduced restriction sites are utilised in the following cloning procedures. The gene synthesis fragment is cloned via these restriction sites into a plasmid designated pEFDHFR following standard protocols. A clone with sequence-verified nucleotide sequence is transfected into DHFR deficient CHO cells for eukaryotic expression of the construct. Eukaryotic protein expression in DHFR deficient CHO cells is performed as described by Kaufmann R. J. (1990) Methods Enzymol. 185, 537-566. Gene amplification of the construct is induced by increasing concentrations of methothrexate (MTX) to a final concentration of up to 20 nM MTX. Alternatively the constructs are transfected into DHFR-deficient CHO-cells in a transient manner according to standard protocols.

[0443] The FACS binding experiments were performed with the human IgE transfected J558L cell line to assess the binding capability to the human IgE. The cross-species specificity to macaque IgE positive cells was tested by deploying the J558L cells transfected with the macaque IgE. The same changes in cell lines apply to the cytotoxicity assays performed with the IgE and CD3 cross-species specific bispecific single chain antibodies. Apart from this the assays were performed as described in examples 4 and 5.

[0444] As depicted in FIG. 23, the generated IgE and CD3 cross-species specific bispecific single chain antibodies demonstrated binding to both the human and cynomolgus antigens and proved to be fully cross-species specific.

[0445] As shown in FIG. 24, all of the generated cross-species specific bispecific single chain antibody constructs revealed cytotoxic activity against human IgE positive target cells elicited by human CD8+ cells and macaque IgE positive target cells elicited by the macaque T cell line 4119LnPx. As a negative control, an irrelevant bispecific single chain antibody has been used.

### Example 26

### Specific Binding of scFv Clones to the N-Terminus of Human CD3 Epsilon

[0446] 26.1. Bacterial Expression of scFv Constructs in E. coli XL1 Blue

[0447] As previously mentioned, E. coli XL1 Blue transformed with pComb3H5Bhis/Flag containing a VL- and VH-segment produce soluble scFv in sufficient amounts after excision of the gene III fragment and induction with 1 mM IPTG. The scFv-chain is exported into the periplasma where it folds into a functional conformation.

[0448] The following scFv clones were chosen for this experiment:
[0449] i) ScFvs 4-10, 3-106, 3-114, 3-148, 4-48, 3-190 and 3-271 as described in WO 2004/106380.
[0450] ii) ScFvs from the human anti-CD3epsilon binding clones H2C, F12Q and I2C as described herein.

[0451] For periplasmic preparations, bacterial cells transformed with the respective scFv containing plasmids allowing for periplasmic expression were grown in SB-medium supplemented with 20 mM MgCl₂ and carbenicillin 50 μg/ml and redissolved in PBS after harvesting. By four rounds of freezing at −70° C. and thawing at 37° C., the outer membrane of the bacteria was destroyed by osmotic shock and the soluble periplasmic proteins including the scFvs were released into the supernatant. After elimination of intact cells and cell-debris by centrifugation, the supernatant containing the human anti-human CD3-scFvs was collected and used for further examination. These crude supernatants containing scFv will be further termed periplasmic preparations (PPP).

[0452] 26.2. Binding of scFvs to Human CD3 Epsilon (aa 1-27)-Fc Fusion Protein

[0453] ELISA experiments were carried out by coating the human CD3 epsilon (aa 1-27)-Fc fusion protein to the wells of 96 well plastic plates (Nunc, maxisorb) typically at 4° C. over night. The antigen coating solution was then removed, wells washed once with PBS/0.05% Tween 20 and subsequently blocked with PBS/3% BSA for at least one hour. After removal of the blocking solution, PPPs and control solutions were added to the wells and incubated for typically one hour at room temperature. The wells were then washed three times with PBS/0.05% Tween 20. Detection of scFvs bound to immobilized antigen was carried out using a Biotin-labeled anti FLAG-tag antibody (M2 anti Flag-Bio, Sigma, typically at a final concentration of 1 μg/ml PBS) and detected with a peroxidase-labeled Streptavidine (Dianova, 1 μg/ml PBS). The signal was developed by adding ABTS substrate solution and measured at a wavelength of 405 nm. Unspecific binding of the test-samples to the blocking agent and/or the human IgG1 portion of the human CD3 epsilon (aa 1-27)-Fc fusion protein was examined by carrying out the identical assay with the identical reagents and identical timing on ELISA plates which were coated with human IgG1 (Sigma). PBS was used as a negative control.

[0454] As shown in FIG. 25, scFvs H2C, F12Q and I2C show strong binding signals on human CD3 epsilon (aa 1-27)-Fc fusion protein. The human scFvs 3-106, 3-114, 3-148, 3-190, 3-271, 4-10 and 4-48 (as described in WO 2004/106380) do not show any significant binding above negative control level.

[0455] To exclude the possibility that the positive binding of scFvs H2C, F12Q and I2C to wells coated with human CD3 epsilon (aa 1-27)-Fc fusion protein might be due to binding to BSA (used as a blocking agent) and/or the human IgG1 Fc-gamma-portion of the human CD3 epsilon (aa 1-27)-Fc fusion protein, a second ELISA experiment was performed in parallel. In this second ELISA experiment, all parameters were identical to those in the first ELISA experiment, except that in the second ELISA experiment human IgG1 (Sigma) was coated instead of human CD3 epsilon (aa 1-27)-Fc fusion protein. As shown in FIG. 26, none of the scFvs tested showed any significant binding to BSA and/or human IgG1 above background level.

[0456] Taken together, these results allow the conclusion that the scFvs 4-10, 3-271, 3-148, 3-190, 4-48, 3-106 and 3-114 do not bind specifically to the human CD3 epsilon (aa 1-27)-region, whereas the scFvs H2C, F12Q and I2C clearly show specific binding to the N-terminal 27 amino acids of human CD3 epsilon.

| SEQ | | | | |
|---|---|---|---|---|
| ID | | | | |
| NO. | DESIGNATION | SOURCE | TYPE | SEQUENCE |
| 1 | Human CD3ε | human | aa | QDGNEEMGGITQTPYKVSISGTTVILTCPQYPGSEILWQHNDKNIGGDEDDKNIGSDEDHLSLKE |
| | extracellular | | | FSELEQSGYYVCYPRGSKPEDANFYLYLRARVCENCMEMD |
| | domain | | | |
| 2 | Human CD3ε 1-27 | human | aa | QDGNEEMGGITQTPYKVSISGTTVILT |
| 3 | Callithrix | Callithrix | aa | QDGNEEMGDTTQNPYKVSISGTTVTLTCPRYDGHEIKWLVNSQNKEGHEDHLLLEDFSEMEQSGY |
| | jacchus | jacchus | | YACLSKETPAEEASHYLYLKARVCENCVEVD |
| | CD3ε | | | |
| | extracellular | | | |
| | domain | | | |
| 4 | Callithrix | Callithrix | aa | QDGNEEMGDTTQNPYKVSISGTTVTLT |
| | jacchus | jacchus | | |
| | CD3ε 1-27 | | | |
| 5 | Saguinus oedipus | Saguinus | aa | QDGNEEMGDTTQNPYKVSISGTTVTLTCPRYDGHEIKWLVNSQNKEGHEDHLLLEDFSEMEQSGY |
| | CD3ε | oedipus | | YACLSKETPAEEASHYLYLKARVCENCVEVD |
| | extracellular | | | |
| | domain | | | |
| 6 | Saguinus oedipus | Saguinus | aa | QDGNEEMGDTTQNPYKVSISGTTVTLT |
| | CD3ε 1-27 | oedipus | | |
| 7 | Saimiri sciureus | Saimiri | aa | QDGNEEIGDTTQNPYKVSISGTTVTLTCPRYDGQEIKWLVNDQNKEGHEDHLLLEDFSEMEQSGY |
| | CD3ε | sciureus | | YACLSKETPTEEASHYLYLKARVCENCVEVD |
| | extracellular | | | |
| | domain | | | |
| 8 | Saimiri sciureus | Saimiri | aa | QDGNEEIGDTTQNPYKVSISGTTVTLT |
| | CD3ε 1-27 | sciureus | | |
| 9 | CDR-L1 of F6A | artificial | aa | GSSTGAVTSGYYPN |
| 10 | CDR-L2 of F6A | artificial | aa | GTKFLAP |
| 11 | CDR-L3 of F6A | artificial | aa | ALWYSNRWV |
| 12 | CDR-H1 of F6A | artificial | aa | IYAMN |
| 13 | CDR-H2 of F6A | artificial | aa | RIRSKYNNYATYYADSVKS |
| 14 | CDR-H3 of F6A | artificial | aa | HGNFGNSYVSFFAY |
| 15 | VH of F6A | artificial | aa | EVQLVESGGGLVQPGGSLKLSCAASGFTFNIYAMNWVRQAPGKGLEWVARIRSKYNNYATYYADS |
| | | | | VKSRFTISRDDSKNTAYLQMNNLKTEDTAVYYCVRHGNFGNSYVSFFAYWGQGTLVTVSS |
| 16 | VH of F6A | artificial | nt | GAGGTGCAGCTGGTCGAGTCTGGAGGAGGATTGGTGCAGCCTGGAGGGTCATTGAAACTCTCATG |
| | | | | TGCAGCCTCTGGATTCACCTTCAATATCTACGCCATGAACTGGGTCCGCCAGGCTCCAGGAAAGG |
| | | | | GTTTGGAATGGGTTGCTCGCATAAGAAGTAAATATAATAATTATGCAACATATTATGCCGATTCA |
| | | | | GTGAAAAGCAGGTTCACCATCTCCAGAGATGATTCAAAAAACACTGCCTATCTACAAATGAACAA |
| | | | | CTTGAAAACTGAGGACACTGCCGTGTACTACTGTGTGAGACATGGGAACTTCGGTAATAGCTACG |
| | | | | TATCCTTCTTCGCTTACTGGGGCCAAGGGACTCTGGTCACCGTCTCCTCA |
| 17 | VL of F6A | artificial | aa | QTVVTQEPSLTVSPGGTVTLTCGSSTGAVTSGYYPNWVQQKPGQAPRGLIGGTKFLAPGTPARFS |
| | | | | GSLLGGKAALTLSGVQPEDEAEYYCALWYSNRWVFGGGTKLTVL |
| 18 | VL of F6A | artificial | nt | CAGACTGTTGTGACTCAGGAACCTTCACTCACCGTATCACCTGGTGGAACAGTCACACTCACTTG |
| | | | | TGGCTCCTCGACTGGGGCTGTTACATCTGGCTACTACCCAAACTGGGTCCAACAAAAACCAGGTC |
| | | | | AGGCACCCCGTGGTCTAATAGGTGGGACTAAGTTCCTCGCCCCCGGTACTCCTGCCAGATTCTCA |
| | | | | GGCTCCCTGCTTGGAGGCAAGGCTGCCCTCACCCTCTCAGGGGTACAGCCAGAGGATGAGGCAGA |
| | | | | ATATTACTGTGCTCTATGGTACAGCAACCGCTGGGTGTTCGGTGGAGGAACCAAACTGACTGTCC |
| | | | | TA |
| 19 | VH-P of F6A | artificial | aa | EVQLLESGGGLVQPGGSLKLSCAASGFTFNIYAMNWVRQAPGKGLEWVARIRSKYNNYATYYADS |
| | | | | VKSRFTISRDDSKNTAYLQMNNLKTEDTAVYYCVRHGNFGNSYVSFFAYWGQGTLVTVSS |
| 20 | VH-P of F6A | artificial | nt | GAGGTGCAGCTGCTCGAGTCTGGAGGAGGATTGGTGCAGCCTGGAGGGTCATTGAAACTCTCATG |
| | | | | TGCAGCCTCTGGATTCACCTTCAATATCTACGCCATGAACTGGGTCCGCCAGGCTCCAGGAAAGG |
| | | | | GTTTGGAATGGGTTGCTCGCATAAGAAGTAAATATAATAATTATGCAACATATTATGCCGATTCA |
| | | | | GTGAAAAGCAGGTTCACCATCTCCAGAGATGATTCAAAAAACACTGCCTATCTACAAATGAACAA |
| | | | | CTTGAAAACTGAGGACACTGCCGTGTACTACTGTGTGAGACATGGGAACTTCGGTAATAGCTACG |
| | | | | TATCCTTCTTCGCTTACTGGGGCCAAGGGACTCTGGTCACCGTCTCCTCA |
| 21 | VL-P of F6A | artificial | aa | ELVVTQEPSLTVSPGGTVTLTCGSSTGAVTSGYYPNWVQQKPGQAPRGLIGGTKFLAPGTPARFS |
| | | | | GSLLGGKAALTLSGVQPEDEAEYYCALWYSNRWVFGGGTKLTVL |
| 22 | VL-P of F6A | artificial | nt | GAGCTCGTTGTGACTCAGGAACCTTCACTCACCGTATCACCTGGTGGAACAGTCACACTCACTTG |
| | | | | TGGCTCCTCGACTGGGGCTGTTACATCTGGCTACTACCCAAACTGGGTCCAACAAAAACCAGGTC |
| | | | | AGGCACCCCGTGGTCTAATAGGTGGGACTAAGTTCCTCGCCCCCGGTACTCCTGCCAGATTCTCA |
| | | | | GGCTCCCTGCTTGGAGGCAAGGCTGCCCTCACCCTCTCAGGGGTACAGCCAGAGGATGAGGCAGA |
| | | | | ATATTACTGTGCTCTATGGTACAGCAACCGCTGGGTGTTCGGTGGAGGAACCAAACTGACTGTCC |
| | | | | TA |
| 23 | VH-VL of F6A | artificial | aa | EVQLVESGGGLVQPGGSLKLSCAASGFTFNIYAMNWVRQAPGKGLEWVARIRSKYNNYATYYADS |
| | | | | VKSRFTISRDDSKNTAYLQMNNLKTEDTAVYYCVRHGNFGNSYVSFFAYWGQGTLVTVSSGGGGS |
| | | | | GGGGSGGGGSQTVVTQEPSLTVSPGGTVTLTCGSSTGAVTSGYYPNWVQQKPGQAPRGLIGGTKF |
| | | | | LAPGTPARFSGSLLGGKAALTLSGVQPEDEAEYYCALWYSNRWVFGGGTKLTVL |
| 24 | VH-VL of F6A | artificial | nt | GAGGTGCAGCTGGTCGAGTCTGGAGGAGGATTGGTGCAGCCTGGAGGGTCATTGAAACTCTCATG |
| | | | | TGCAGCCTCTGGATTCACCTTCAATATCTACGCCATGAACTGGGTCCGCCAGGCTCCAGGAAAGG |
| | | | | GTTTGGAATGGGTTGCTCGCATAAGAAGTAAATATAATAATTATGCAACATATTATGCCGATTCA |
| | | | | GTGAAAAGCAGGTTCACCATCTCCAGAGATGATTCAAAAAACACTGCCTATCTACAAATGAACAA |
| | | | | CTTGAAAACTGAGGACACTGCCGTGTACTACTGTGTGAGACATGGGAACTTCGGTAATAGCTACG |
| | | | | TATCCTTCTTCGCTTACTGGGGCCAAGGGACTCTGGTCACCGTCTCCTCAGGTGGTGGTGGTTCT |
| | | | | GGCGGCGGCGGCTCCGGTGGTGGTGGTTCTCAGACTGTTGTGACTCAGGAACCTTCACTCACCGT |
| | | | | ATCACCTGGTGGAACAGTCACACTCACTTGTGGCTCCTCGACTGGGGCTGTTACATCTGGCTACT |
| | | | | ACCCAAACTGGGTCCAACAAAAACCAGGTCAGGCACCCCGTGGTCTAATAGGTGGGACTAAGTTC |
| | | | | CTCGCCCCCGGTACTCCTGCCAGATTCTCAGGCTCCCTGCTTGGAGGCAAGGCTGCCCTCACCCT |
| | | | | CTCAGGGGTACAGCCAGAGGATGAGGCAGAATATTACTGTGCTCTATGGTACAGCAACCGCTGGG |
| | | | | TGTTCGGTGGAGGAACCAAACTGACTGTCCTA |
| 25 | VH-VL-P of F6A | artificial | aa | EVQLLESGGGLVQPGGSLKLSCAASGFTFNIYAMNWVRQAPGKGLEWVARIRSKYNNYATYYADS |
| | | | | VKSRFTISRDDSKNTAYLQMNNLKTEDTAVYYCVRHGNFGNSYVSFFAYWGQGTLVTVSSGGGGS |
| | | | | GGGGSGGGGSELVVTQEPSLTVSPGGTVTLTCGSSTGAVTSGYYPNWVQQKPGQAPRGLIGGTKF |
| | | | | LAPGTPARFSGSLLGGKAALTLSGVQPEDEAEYYCALWYSNRWVFGGGTKLTVL |
| 26 | VH-VL-P of F6A | artificial | nt | GAGGTGCAGCTGCTCGAGTCTGGAGGAGGATTGGTGCAGCCTGGAGGGTCATTGAAACTCTCATG |
| | | | | TGCAGCCTCTGGATTCACCTTCAATATCTACGCCATGAACTGGGTCCGCCAGGCTCCAGGAAAGG |
| | | | | GTTTGGAATGGGTTGCTCGCATAAGAAGTAAATATAATAATTATGCAACATATTATGCCGATTCA |
| | | | | GTGAAAAGCAGGTTCACCATCTCCAGAGATGATTCAAAAAACACTGCCTATCTACAAATGAACAA |
| | | | | CTTGAAAACTGAGGACACTGCCGTGTACTACTGTGTGAGACATGGGAACTTCGGTAATAGCTACG |
| | | | | TATCCTTCTTCGCTTACTGGGGCCAAGGGACTCTGGTCACCGTCTCCTCAGGTGGTGGTGGTTCT |
| | | | | GGCGGCGGCGGCTCCGGTGGTGGTGGTTCTGAGCTCGTTGTGACTCAGGAACCTTCACTCACCGT |
| | | | | ATCACCTGGTGGAACAGTCACACTCACTTGTGGCTCCTCGACTGGGGCTGTTACATCTGGCTACT |
| | | | | ACCCAAACTGGGTCCAACAAAAACCAGGTCAGGCACCCCGTGGTCTAATAGGTGGGACTAAGTTC |
| | | | | CTCGCCCCCGGTACTCCTGCCAGATTCTCAGGCTCCCTGCTTGGAGGCAAGGCTGCCCTCACCCT |
| | | | | CTCAGGGGTACAGCCAGAGGATGAGGCAGAATATTACTGTGCTCTATGGTACAGCAACCGCTGGG |
| | | | | TGTTCGGTGGAGGAACCAAACTGACTGTCCTA |
| 27 | CDR-L1 of H2C | artificial | aa | GSSTGAVTSGYYPN |
| 28 | CDR-L2 of H2C | artificial | aa | GTKFLAP |
| 29 | CDR-L3 of H2C | artificial | aa | ALWYSNRWV |
| 30 | CDR-H1 of H2C | artificial | aa | KYAMN |
| 31 | CDR-H2 of H2C | artificial | aa | RIRSKYNNYATYYADSVKD |
| 32 | CDR-H3 of H2C | artificial | aa | HGNFGNSYISYWAY |
| 33 | VH of H2C | artificial | aa | EVQLVESGGGLVQPGGSLKLSCAASGFTFNKYAMNWVRQAPGKGLEWVARIRSKYNNYATYYADS |
| | | | | VKDRFTISRDDSKNTAYLQMNNLKTEDTAVYYCVRHGNFGNSYISYWAYWGQGTLVTVSS |
| 34 | VH of H2C | artificial | nt | GAGGTGCAGCTGGTCGAGTCTGGAGGAGGATTGGTGCAGCCTGGAGGGTCATTGAAACTCTCATG |
| | | | | TGCAGCCTCTGGATTCACCTTCAATAAGTACGCCATGAACTGGGTCCGCCAGGCTCCAGGAAAGG |
| | | | | GTTTGGAATGGGTTGCTCGCATAAGAAGTAAATATAATAATTATGCAACATATTATGCCGATTCA |
| | | | | GTGAAAGACAGGTTCACCATCTCCAGAGATGATTCAAAAAACACTGCCTATCTACAAATGAACAA |
| | | | | CTTGAAAACTGAGGACACTGCCGTGTACTACTGTGTGAGACATGGGAACTTCGGTAATAGCTACA |
| | | | | TATCCTACTGGGCTTACTGGGGCCAAGGGACTCTGGTCACCGTCTCCTCA |
| 35 | VL of H2C | artificial | aa | QTVVTQEPSLTVSPGGTVTLTCGSSTGAVTSGYYPNWVQQKPGQAPRGLIGGTKFLAPGTPARFS |
| | | | | GSLLGGKAALTLSGVQPEDEAEYYCALWYSNRWVFGGGTKLTVL |
| 36 | VL of H2C | artificial | nt | CAGACTGTTGTGACTCAGGAACCTTCACTCACCGTATCACCTGGTGGAACAGTCACACTCACTTG |
| | | | | TGGCTCCTCGACTGGGGCTGTTACATCTGGCTACTACCCAAACTGGGTCCAACAAAAACCAGGTC |
| | | | | AGGCACCCCGTGGTCTAATAGGTGGGACTAAGTTCCTCGCCCCCGGTACTCCTGCCAGATTCTCA |
| | | | | GGCTCCCTGCTTGGAGGCAAGGCTGCCCTCACCCTCTCAGGGGTACAGCCAGAGGATGAGGCAGA |
| | | | | ATATTACTGTGCTCTATGGTACAGCAACCGCTGGGTGTTCGGTGGAGGAACCAAACTGACTGTCC |
| | | | | TA |
| 37 | VH-P of H2C | artificial | aa | EVQLLESGGGLVQPGGSLKLSCAASGFTFNKYAMNWVRQAPGKGLEWVARIRSKYNNYATYYADS |
| | | | | VKDRFTISRDDSKNTAYLQMNNLKTEDTAVYYCVRHGNFGNSYISYWAYWGQGTLVTVSS |
| 38 | VH-P of H2C | artificial | nt | GAGGTGCAGCTGCTCGAGTCTGGAGGAGGATTGGTGCAGCCTGGAGGGTCATTGAAACTCTCATG |
| | | | | TGCAGCCTCTGGATTCACCTTCAATAAGTACGCCATGAACTGGGTCCGCCAGGCTCCAGGAAAGG |
| | | | | GTTTGGAATGGGTTGCTCGCATAAGAAGTAAATATAATAATTATGCAACATATTATGCCGATTCA |
| | | | | GTGAAAGACAGGTTCACCATCTCCAGAGATGATTCAAAAAACACTGCCTATCTACAAATGAACAA |
| | | | | CTTGAAAACTGAGGACACTGCCGTGTACTACTGTGTGAGACATGGGAACTTCGGTAATAGCTACA |
| | | | | TATCCTACTGGGCTTACTGGGGCCAAGGGACTCTGGTCACCGTCTCCTCA |
| 39 | VL-P of H2C | artificial | aa | ELVVTQEPSLTVSPGGTVTLTCGSSTGAVTSGYYPNWVQQKPGQAPRGLIGGTKFLAPGTPARFS |
| | | | | GSLLGGKAALTLSGVQPEDEAEYYCALWYSNRWVFGGGTKLTVL |
| 40 | VL-P of H2C | artificial | nt | GAGCTCGTTGTGACTCAGGAACCTTCACTCACCGTATCACCTGGTGGAACAGTCACACTCACTTG |
| | | | | TGGCTCCTCGACTGGGGCTGTTACATCTGGCTACTACCCAAACTGGGTCCAACAAAAACCAGGTC |
| | | | | AGGCACCCCGTGGTCTAATAGGTGGGACTAAGTTCCTCGCCCCCGGTACTCCTGCCAGATTCTCA |
| | | | | GGCTCCCTGCTTGGAGGCAAGGCTGCCCTCACCCTCTCAGGGGTACAGCCAGAGGATGAGGCAGA |
| | | | | ATATTACTGTGCTCTATGGTACAGCAACCGCTGGGTGTTCGGTGGAGGAACCAAACTGACTGTCC |
| | | | | TA |
| 41 | VH-VL of H2C | artificial | aa | EVQLVESGGGLVQPGGSLKLSCAASGFTFNKYAMNWVRQAPGKGLEWVARIRSKYNNYATYYADS |
| | | | | VKDRFTISRDDSKNTAYLQMNNLKTEDTAVYYCVRHGNFGNSYISYWAYWGQGTLVTVSSGGGGS |
| | | | | GGGGSGGGGSQTVVTQEPSLTVSPGGTVTLTCGSSTGAVTSGYYPNWVQQKPGQAPRGLIGGTKF |
| | | | | LAPGTPARFSGSLLGGKAALTLSGVQPEDEAEYYCALWYSNRWVFGGGTKLTVL |
| 42 | VH-VL of H2C | artificial | nt | GAGGTGCAGCTGGTCGAGTCTGGAGGAGGATTGGTGCAGCCTGGAGGGTCATTGAAACTCTCATG |
| | | | | TGCAGCCTCTGGATTCACCTTCAATAAGTACGCCATGAACTGGGTCCGCCAGGCTCCAGGAAAGG |
| | | | | GTTTGGAATGGGTTGCTCGCATAAGAAGTAAATATAATAATTATGCAACATATTATGCCGATTCA |
| | | | | GTGAAAGACAGGTTCACCATCTCCAGAGATGATTCAAAAAACACTGCCTATCTACAAATGAACAA |
| | | | | CTTGAAAACTGAGGACACTGCCGTGTACTACTGTGTGAGACATGGGAACTTCGGTAATAGCTACA |
| | | | | TATCCTACTGGGCTTACTGGGGCCAAGGGACTCTGGTCACCGTCTCCTCAGGTGGTGGTGGTTCT |
| | | | | GGCGGCGGCGGCTCCGGTGGTGGTGGTTCTCAGACTGTTGTGACTCAGGAACCTTCACTCACCGT |
| | | | | ATCACCTGGTGGAACAGTCACACTCACTTGTGGCTCCTCGACTGGGGCTGTTACATCTGGCTACT |
| | | | | ACCCAAACTGGGTCCAACAAAAACCAGGTCAGGCACCCCGTGGTCTAATAGGTGGGACTAAGTTC |
| | | | | CTCGCCCCCGGTACTCCTGCCAGATTCTCAGGCTCCCTGCTTGGAGGCAAGGCTGCCCTCACCCT |
| | | | | CTCAGGGGTACAGCCAGAGGATGAGGCAGAATATTACTGTGCTCTATGGTACAGCAACCGCTGGG |
| | | | | TGTTCGGTGGAGGAACCAAACTGACTGTCCTA |
| 43 | VH-VL-P of H2C | artificial | aa | EVQLLESGGGLVQPGGSLKLSCAASGFTFNKYAMNWVRQAPGKGLEWVARIRSKYNNYATYYADS |
| | | | | VKDRFTISRDDSKNTAYLQMNNLKTEDTAVYYCVRHGNFGNSYISYWAYWGQGTLVTVSSGGGGS |
| | | | | GGGGSGGGGSELVVTQEPSLTVSPGGTVTLTCGSSTGAVTSGYYPNWVQQKPGQAPRGLIGGTKF |
| | | | | LAPGTPARFSGSLLGGKAALTLSGVQPEDEAEYYCALWYSNRWVFGGGTKLTVL |
| 44 | VH-VL-P of H2C | artificial | nt | GAGGTGCAGCTGCTCGAGTCTGGAGGAGGATTGGTGCAGCCTGGAGGGTCATTGAAACTCTCATG |
| | | | | TGCAGCCTCTGGATTCACCTTCAATAAGTACGCCATGAACTGGGTCCGCCAGGCTCCAGGAAAGG |
| | | | | GTTTGGAATGGGTTGCTCGCATAAGAAGTAAATATAATAATTATGCAACATATTATGCCGATTCA |
| | | | | GTGAAAGACAGGTTCACCATCTCCAGAGATGATTCAAAAAACACTGCCTATCTACAAATGAACAA |
| | | | | CTTGAAAACTGAGGACACTGCCGTGTACTACTGTGTGAGACATGGGAACTTCGGTAATAGCTACA |
| | | | | TATCCTACTGGGCTTACTGGGGCCAAGGGACTCTGGTCACCGTCTCCTCAGGTGGTGGTGGTTCT |
| | | | | GGCGGCGGCGGCTCCGGTGGTGGTGGTTCTGAGCTCGTTGTGACTCAGGAACCTTCACTCACCGT |
| | | | | ATCACCTGGTGGAACAGTCACACTCACTTGTGGCTCCTCGACTGGGGCTGTTACATCTGGCTACT |
| | | | | ACCCAAACTGGGTCCAACAAAAACCAGGTCAGGCACCCCGTGGTCTAATAGGTGGGACTAAGTTC |
| | | | | CTCGCCCCCGGTACTCCTGCCAGATTCTCAGGCTCCCTGCTTGGAGGCAAGGCTGCCCTCACCCT |
| | | | | CTCAGGGGTACAGCCAGAGGATGAGGCAGAATATTACTGTGCTCTATGGTACAGCAACCGCTGGG |
| | | | | TGTTCGGTGGAGGAACCAAACTGACTGTCCTA |
| 45 | CDR-L1 of H1E | artificial | aa | GSSTGAVTSGYYPN |
| 46 | CDR-L2 of H1E | artificial | aa | GTKFLAP |
| 47 | CDR-L3 of H1E | artificial | aa | ALWYSNRWV |
| 48 | CDR-H1 of H1E | artificial | aa | SYAMN |
| 49 | CDR-H2 of H1E | artificial | aa | RIRSKYNNYATYYADSVKG |
| 50 | CDR-H3 of H1E | artificial | aa | HGNFGNSYLSFWAY |
| 51 | VH of H1E | artificial | aa | EVQLVESGGGLEQPGGSLKLSCAASGFTFNSYAMNWVRQAPGKGLEWVARIRSKYNNYATYYADS |
| | | | | VKGRFTISRDDSKNTAYLQMNNLKTEDTAVYYCVRHGNFGNSYLSFWAYWGQGTLVTVSS |
| 52 | VH of H1E | artificial | nt | GAGGTGCAGCTGGTCGAGTCTGGAGGAGGATTGGAGCAGCCTGGAGGGTCATTGAAACTCTCATG |
| | | | | TGCAGCCTCTGGATTCACCTTCAATTCGTACGCCATGAACTGGGTCCGCCAGGCTCCAGGAAAGG |
| | | | | GTTTGGAATGGGTTGCTCGCATAAGAAGTAAATATAATAATTATGCAACATATTATGCCGATTCA |
| | | | | GTGAAAGGGAGGTTCACCATCTCCAGAGATGATTCAAAAAACACTGCCTATCTACAAATGAACAA |
| | | | | CTTGAAAACTGAGGACACTGCCGTGTACTACTGTGTGAGACATGGGAACTTCGGTAATAGCTACC |
| | | | | TATCCTTCTGGGCTTACTGGGGCCAAGGGACTCTGGTCACCGTCTCCTC |
| 53 | VL of H1E | artificial | aa | QTVVTQEPSLTVSPGGTVTLTCGSSTGAVTSGYYPNWVQQKPGQAPRGLIGGTKFLAPGTPARFS |
| | | | | GSLLGGKAALTLSGVQPEDEAEYYCALWYSNRWVFGGGTKLTVL |
| 54 | VL of H1E | artificial | nt | CAGACTGTTGTGACTCAGGAACCTTCACTCACCGTATCACCTGGTGGAACAGTCACACTCACTTG |
| | | | | TGGCTCCTCGACTGGGGCTGTTACATCTGGCTACTACCCAAACTGGGTCCAACAAAAACCAGGTC |
| | | | | AGGCACCCCGTGGTCTAATAGGTGGGACTAAGTTCCTCGCCCCCGGTACTCCTGCCAGATTCTCA |
| | | | | GGCTCCCTGCTTGGAGGCAAGGCTGCCCTCACCCTCTCAGGGGTACAGCCAGAGGATGAGGCAGA |
| | | | | ATATTACTGTGCTCTATGGTACAGCAACCGCTGGGTGTTCGGTGGAGGAACCAAACTGACTGTCC |
| | | | | TA |
| 55 | VH-P of H1E | artificial | aa | EVQLLESGGGLEQPGGSLKLSCAASGFTFNSYAMNWVRQAPGKGLEWVARIRSKYNNYATYYADS |
| | | | | VKGRFTISRDDSKNTAYLQMNNLKTEDTAVYYCVRHGNFGNSYLSFWAYWGQGTLVTVSS |
| 56 | VH-P of H1E | artificial | nt | GAGGTGCAGCTGCTCGAGTCTGGAGGAGGATTGGAGCAGCCTGGAGGGTCATTGAAACTCTCATG |
| | | | | TGCAGCCTCTGGATTCACCTTCAATTCGTACGCCATGAACTGGGTCCGCCAGGCTCCAGGAAAGG |
| | | | | GTTTGGAATGGGTTGCTCGCATAAGAAGTAAATATAATAATTATGCAACATATTATGCCGATTCA |
| | | | | GTGAAAGGGAGGTTCACCATCTCCAGAGATGATTCAAAAAACACTGCCTATCTACAAATGAACAA |
| | | | | CTTGAAAACTGAGGACACTGCCGTGTACTACTGTGTGAGACATGGGAACTTCGGTAATAGCTACC |
| | | | | TATCCTTCTGGGCTTACTGGGGCCAAGGGACTCTGGTCACCGTCTCCTCA |
| 57 | VL-P of H1E | artificial | aa | ELVVTQEPSLTVSPGGTVTLTCGSSTGAVTSGYYPNWVQQKPGQAPRGLIGGTKFLAPGTPARFS |
| | | | | GSLLGGKAALTLSGVQPEDEAEYYCALWYSNRWVFGGGTKLTVL |
| 58 | VL-P of H1E | artificial | nt | GAGCTCGTTGTGACTCAGGAACCTTCACTCACCGTATCACCTGGTGGAACAGTCACACTCACTTG |
| | | | | TGGCTCCTCGACTGGGGCTGTTACATCTGGCTACTACCCAAACTGGGTCCAACAAAAACCAGGTC |
| | | | | AGGCACCCCGTGGTCTAATAGGTGGGACTAAGTTCCTCGCCCCCGGTACTCCTGCCAGATTCTCA |
| | | | | GGCTCCCTGCTTGGAGGCAAGGCTGCCCTCACCCTCTCAGGGGTACAGCCAGAGGATGAGGCAGA |
| | | | | ATATTACTGTGCTCTATGGTACAGCAACCGCTGGGTGTTCGGTGGAGGAACCAAACTGACTGTCC |
| | | | | TA |
| 59 | VH-VL of H1E | artificial | aa | EVQLVESGGGLEQPGGSLKLSCAASGFTFNSYAMNWVRQAPGKGLEWVARIRSKYNNYATYYADS |
| | | | | VKGRFTISRDDSKNTAYLQMNNLKTEDTAVYYCVRHGNFGNSYLSFWAYWGQGTLVTVSSGGGGS |
| | | | | GGGGSGGGGSQTVVTQEPSLTVSPGGTVTLTCGSSTGAVTSGYYPNWVQQKPGQAPRGLIGGTKF |
| | | | | LAPGTPARFSGSLLGGKAALTLSGVQPEDEAEYYCALWYSNRWVFGGGTKLTVL |
| 60 | VH-VL of H1E | artificial | nt | GAGGTGCAGCTGGTCGAGTCTGGAGGAGGATTGGAGCAGCCTGGAGGGTCATTGAAACTCTCATG |
| | | | | TGCAGCCTCTGGATTCACCTTCAATTCGTACGCCATGAACTGGGTCCGCCAGGCTCCAGGAAAGG |
| | | | | GTTTGGAATGGGTTGCTCGCATAAGAAGTAAATATAATAATTATGCAACATATTATGCCGATTCA |
| | | | | GTGAAAGGGAGGTTCACCATCTCCAGAGATGATTCAAAAAACACTGCCTATCTACAAATGAACAA |
| | | | | CTTGAAAACTGAGGACACTGCCGTGTACTACTGTGTGAGACATGGGAACTTCGGTAATAGCTACC |
| | | | | TATCCTTCTGGGCTTACTGGGGCCAAGGGACTCTGGTCACCGTCTCCTCAGGTGGTGGTGGTTCT |
| | | | | GGCGGCGGCGGCTCCGGTGGTGGTGGTTCTCAGACTGTTGTGACTCAGGAACCTTCACTCACCGT |
| | | | | ATCACCTGGTGGAACAGTCACACTCACTTGTGGCTCCTCGACTGGGGCTGTTACATCTGGCTACT |
| | | | | ACCCAAACTGGGTCCAACAAAAACCAGGTCAGGCACCCCGTGGTCTAATAGGTGGGACTAAGTTC |
| | | | | CTCGCCCCCGGTACTCCTGCCAGATTCTCAGGCTCCCTGCTTGGAGGCAAGGCTGCCCTCACCCT |
| | | | | CTCAGGGGTACAGCCAGAGGATGAGGCAGAATATTACTGTGCTCTATGGTACAGCAACCGCTGGG |
| | | | | TGTTCGGTGGAGGAACCAAACTGACTGTCCTA |
| 61 | VH-VL-P of H1E | artificial | aa | EVQLLESGGGLEQPGGSLKLSCAASGFTFNSYAMNWVRQAPGKGLEWVARIRSKYNNYATYYADS |
| | | | | VKGRFTISRDDSKNTAYLQMNNLKTEDTAVYYCVRHGNFGNSYLSFWAYWGQGTLVTVSSGGGGS |
| | | | | GGGGSGGGGSELVVTQEPSLTVSPGGTVTLTCGSSTGAVTSGYYPNWVQQKPGQAPRGLIGGTKF |
| | | | | LAPGTPARFSGSLLGGKAALTLSGVQPEDEAEYYCALWYSNRWVFGGGTKLTVL |
| 62 | VH-VL-P of H1E | artificial | nt | GAGGTGCAGCTGCTCGAGTCTGGAGGAGGATTGGAGCAGCCTGGAGGGTCATTGAAACTCTCATG |
| | | | | TGCAGCCTCTGGATTCACCTTCAATTCGTACGCCATGAACTGGGTCCGCCAGGCTCCAGGAAAGG |
| | | | | GTTTGGAATGGGTTGCTCGCATAAGAAGTAAATATAATAATTATGCAACATATTATGCCGATTCA |
| | | | | GTGAAAGGGAGGTTCACCATCTCCAGAGATGATTCAAAAAACACTGCCTATCTACAAATGAACAA |
| | | | | CTTGAAAACTGAGGACACTGCCGTGTACTACTGTGTGAGACATGGGAACTTCGGTAATAGCTACC |
| | | | | TATCCTTCTGGGCTTACTGGGGCCAAGGGACTCTGGTCACCGTCTCCTCAGGTGGTGGTGGTTCT |
| | | | | GGCGGCGGCGGCTCCGGTGGTGGTGGTTCTGAGCTCGTTGTGACTCAGGAACCTTCACTCACCGT |
| | | | | ATCACCTGGTGGAACAGTCACACTCACTTGTGGCTCCTCGACTGGGGCTGTTACATCTGGCTACT |
| | | | | ACCCAAACTGGGTCCAACAAAAACCAGGTCAGGCACCCCGTGGTCTAATAGGTGGGACTAAGTTC |
| | | | | CTCGCCCCCGGTACTCCTGCCAGATTCTCAGGCTCCCTGCTTGGAGGCAAGGCTGCCCTCACCCT |
| | | | | CTCAGGGGTACAGCCAGAGGATGAGGCAGAATATTACTGTGCTCTATGGTACAGCAACCGCTGGG |
| | | | | TGTTCGGTGGAGGAACCAAACTGACTGTCCTA |
| 63 | CDR-L1 of G4H | artificial | aa | GSSTGAVTSGYYPN |
| 64 | CDR-L2 of G4H | artificial | aa | GTKFLAP |
| 65 | CDR-L3 of G4H | artificial | aa | ALWYSNRWV |
| 66 | CDR-H1 of G4H | artificial | aa | RYAMN |
| 67 | CDR-H2 of G4H | artificial | aa | RIRSKYNNYATYYADSVKG |
| 68 | CDR-H3 of G4H | artificial | aa | HGNFGNSYLSYFAY |
| 69 | VH of G4H | artificial | aa | EVQLVESGGGLVQPGGSLKLSCAASGFTFNRYAMNWVRQAPGKGLEWVARIRSKYNNYATYYADS |
| | | | | VKGRFTISRDDSKNTAYLQMNNLKTEDTAVYYCVRHGNFGNSYLSYFAYWGQGTLVTVSS |
| 70 | VH of G4H | artificial | nt | GAGGTGCAGCTGGTCGAGTCTGGAGGAGGATTGGTGCAGCCTGGAGGGTCATTGAAACTCTCATG |
| | | | | TGCAGCCTCTGGATTCACCTTCAATCGCTACGCCATGAACTGGGTCCGCCAGGCTCCAGGAAAGG |
| | | | | GTTTGGAATGGGTTGCTCGCATAAGAAGTAAATATAATAATTATGCAACATATTATGCCGATTCA |
| | | | | GTGAAAGGGAGGTTCACCATCTCCAGAGATGATTCAAAAAACACTGCCTATCTACAAATGAACAA |
| | | | | CTTGAAAACTGAGGACACTGCCGTGTACTACTGTGTGAGACATGGGAACTTCGGTAATAGCTACT |
| | | | | TATCCTACTTCGCTTACTGGGGCCAAGGGACTCTGGTCACCGTCTCCTCA |
| 71 | VL of G4H | artificial | aa | QTVVTQEPSLTVSPGGTVTLTCGSSTGAVTSGYYPNWVQQKPGQAPRGLIGGTKFLAPGTPARFS |
| | | | | GSLLGGKAALTLSGVQPEDEAEYYCALWYSNRWVFGGGTKLTVL |
| 72 | VL of G4H | artificial | nt | CAGACTGTTGTGACTCAGGAACCTTCACTCACCGTATCACCTGGTGGAACAGTCACACTCACTTG |
| | | | | TGGCTCCTCGACTGGGGCTGTTACATCTGGCTACTACCCAAACTGGGTCCAACAAAAACCAGGTC |
| | | | | AGGCACCCCGTGGTCTAATAGGTGGGACTAAGTTCCTCGCCCCCGGTACTCCTGCCAGATTCTCA |
| | | | | GGCTCCCTGCTTGGAGGCAAGGCTGCCCTCACCCTCTCAGGGGTACAGCCAGAGGATGAGGCAGA |
| | | | | ATATTACTGTGCTCTATGGTACAGCAACCGCTGGGTGTTCGGTGGAGGAACCAAACTGACTGTCC |
| | | | | TA |
| 73 | VH-P of G4H | artificial | aa | EVQLLESGGGLVQPGGSLKLSCAASGFTFNRYAMNWVRQAPGKGLEWVARIRSKYNNYATYYADS |
| | | | | VKGRFTISRDDSKNTAYLQMNNLKTEDTAVYYCVRHGNFGNSYLSYFAYWGQGTLVTVSS |
| 74 | VH-P of G4H | artificial | nt | GAGGTGCAGCTGCTCGAGTCTGGAGGAGGATTGGTGCAGCCTGGAGGGTCATTGAAACTCTCATG |
| | | | | TGCAGCCTCTGGATTCACCTTCAATCGCTACGCCATGAACTGGGTCCGCCAGGCTCCAGGAAAGG |
| | | | | GTTTGGAATGGGTTGCTCGCATAAGAAGTAAATATAATAATTATGCAACATATTATGCCGATTCA |
| | | | | GTGAAAGGGAGGTTCACCATCTCCAGAGATGATTCAAAAAACACTGCCTATCTACAAATGAACAA |
| | | | | CTTGAAAACTGAGGACACTGCCGTGTACTACTGTGTGAGACATGGGAACTTCGGTAATAGCTACT |
| | | | | TATCCTACTTCGCTTACTGGGGCCAAGGGACTCTGGTCACCGTCTCCTCA |
| 75 | VL-P of G4H | artificial | aa | ELVVTQEPSLTVSPGGTVTLTCGSSTGAVTSGYYPNWVQQKPGQAPRGLIGGTKFLAPGTPARFS |
| | | | | GSLLGGKAALTLSGVQPEDEAEYYCALWYSNRWVFGGGTKLTVL |
| 76 | VL-P of G4H | artificial | nt | GAGCTCGTTGTGACTCAGGAACCTTCACTCACCGTATCACCTGGTGGAACAGTCACACTCACTTG |
| | | | | TGGCTCCTCGACTGGGGCTGTTACATCTGGCTACTACCCAAACTGGGTCCAACAAAAACCAGGTC |
| | | | | AGGCACCCCGTGGTCTAATAGGTGGGACTAAGTTCCTCGCCCCCGGTACTCCTGCCAGATTCTCA |
| | | | | GGCTCCCTGCTTGGAGGCAAGGCTGCCCTCACCCTCTCAGGGGTACAGCCAGAGGATGAGGCAGA |
| | | | | ATATTACTGTGCTCTATGGTACAGCAACCGCTGGGTGTTCGGTGGAGGAACCAAACTGACTGTCC |
| | | | | TA |
| 77 | VH-VL of G4H | artificial | aa | EVQLVESGGGLVQPGGSLKLSCAASGFTFNRYAMNWVRQAPGKGLEWVARIRSKYNNYATYYADS |
| | | | | VKGRFTISRDDSKNTAYLQMNNLKTEDTAVYYCVRHGNFGNSYLSYFAYWGQGTLVTVSSGGGGS |
| | | | | GGGGSGGGGSQTVVTQEPSLTVSPGGTVTLTCGSSTGAVTSGYYPNWVQQKPGQAPRGLIGGTKF |
| | | | | LAPGTPARFSGSLLGGKAALTLSGVQPEDEAEYYCALWYSNRWVFGGGTKLTVL |
| 78 | VH-VL of G4H | artificial | nt | GAGGTGCAGCTGGTCGAGTCTGGAGGAGGATTGGTGCAGCCTGGAGGGTCATTGAAACTCTCATG |
| | | | | TGCAGCCTCTGGATTCACCTTCAATCGCTACGCCATGAACTGGGTCCGCCAGGCTCCAGGAAAGG |
| | | | | GTTTGGAATGGGTTGCTCGCATAAGAAGTAAATATAATAATTATGCAACATATTATGCCGATTCA |
| | | | | GTGAAAGGGAGGTTCACCATCTCCAGAGATGATTCAAAAAACACTGCCTATCTACAAATGAACAA |
| | | | | CTTGAAAACTGAGGACACTGCCGTGTACTACTGTGTGAGACATGGGAACTTCGGTAATAGCTACT |
| | | | | TATCCTACTTCGCTTACTGGGGCCAAGGGACTCTGGTCACCGTCTCCTCAGGTGGTGGTGGTTCT |
| | | | | GGCGGCGGCGGCTCCGGTGGTGGTGGTTCTCAGACTGTTGTGACTCAGGAACCTTCACTCACCGT |
| | | | | ATCACCTGGTGGAACAGTCACACTCACTTGTGGCTCCTCGACTGGGGCTGTTACATCTGGCTACT |
| | | | | ACCCAAACTGGGTCCAACAAAAACCAGGTCAGGCACCCCGTGGTCTAATAGGTGGGACTAAGTTC |
| | | | | CTCGCCCCCGGTACTCCTGCCAGATTCTCAGGCTCCCTGCTTGGAGGCAAGGCTGCCCTCACCCT |
| | | | | CTCAGGGGTACAGCCAGAGGATGAGGCAGAATATTACTGTGCTCTATGGTACAGCAACCGCTGGG |
| | | | | TGTTCGGTGGAGGAACCAAACTGACTGTCCTA |
| 79 | VH-VL-P of G4H | artificial | aa | EVQLLESGGGLVQPGGSLKLSCAASGFTFNRYAMNWVRQAPGKGLEWVARIRSKYNNYATYYADS |
| | | | | VKGRFTISRDDSKNTAYLQMNNLKTEDTAVYYCVRHGNFGNSYLSYFAYWGQGTLVTVSSGGGGS |
| | | | | GGGGSGGGGSELVVTQEPSLTVSPGGTVTLTCGSSTGAVTSGYYPNWVQQKPGQAPRGLIGGTKF |
| | | | | LAPGTPARFSGSLLGGKAALTLSGVQPEDEAEYYCALWYSNRWVFGGGTKLTVL |
| 80 | VH-VL-P of G4H | artificial | nt | GAGGTGCAGCTGCTCGAGTCTGGAGGAGGATTGGTGCAGCCTGGAGGGTCATTGAAACTCTCATG |
| | | | | TGCAGCCTCTGGATTCACCTTCAATCGCTACGCCATGAACTGGGTCCGCCAGGCTCCAGGAAAGG |
| | | | | GTTTGGAATGGGTTGCTCGCATAAGAAGTAAATATAATAATTATGCAACATATTATGCCGATTCA |
| | | | | GTGAAAGGGAGGTTCACCATCTCCAGAGATGATTCAAAAAACACTGCCTATCTACAAATGAACAA |
| | | | | CTTGAAAACTGAGGACACTGCCGTGTACTACTGTGTGAGACATGGGAACTTCGGTAATAGCTACT |
| | | | | TATCCTACTTCGCTTACTGGGGCCAAGGGACTCTGGTCACCGTCTCCTCAGGTGGTGGTGGTTCT |
| | | | | GGCGGCGGCGGCTCCGGTGGTGGTGGTTCTGAGCTCGTTGTGACTCAGGAACCTTCACTCACCGT |
| | | | | ATCACCTGGTGGAACAGTCACACTCACTTGTGGCTCCTCGACTGGGGCTGTTACATCTGGCTACT |
| | | | | ACCCAAACTGGGTCCAACAAAAACCAGGTCAGGCACCCCGTGGTCTAATAGGTGGGACTAAGTTC |
| | | | | CTCGCCCCCGGTACTCCTGCCAGATTCTCAGGCTCCCTGCTTGGAGGCAAGGCTGCCCTCACCCT |
| | | | | CTCAGGGGTACAGCCAGAGGATGAGGCAGAATATTACTGTGCTCTATGGTACAGCAACCGCTGGG |
| | | | | TGTTCGGTGGAGGAACCAAACTGACTGTCCTA |
| 81 | CDR-L1 of A2J | artificial | aa | RSSTGAVTSGYYPN |
| 82 | CDR-L2 of A2J | artificial | aa | ATDMRPS |
| 83 | CDR-L3 of A2J | artificial | aa | ALWYSNRWV |
| 84 | CDR-H1 of A2J | artificial | aa | VYAMN |
| 85 | CDR-H2 of A2J | artificial | aa | RIRSKYNNYATYYADSVKK |
| 86 | CDR-H3 of A2J | artificial | aa | HGNFGNSYLSWWAY |
| 87 | VH of A2J | artificial | aa | EVQLVESGGGLVQPGGSLKLSCAASGFTFNVYAMNWVRQAPGKGLEWVARIRSKYNNYATYYADS |
| | | | | VKKRFTISRDDSKNTAYLQMNNLKTEDTAVYYCVRHGNFGNSYLSWWAYWGQGTLVTVSS |
| 88 | VH of A2J | artificial | nt | GAGGTGCAGCTGGTCGAGTCTGGAGGAGGATTGGTGCAGCCTGGAGGGTCATTGAAACTCTCATG |
| | | | | TGCAGCCTCTGGATTCACCTTCAATGTCTACGCCATGAACTGGGTCCGCCAGGCTCCAGGAAAGG |
| | | | | GTTTGGAATGGGTTGCTCGCATAAGAAGTAAATATAATAATTATGCAACATATTATGCCGATTCA |
| | | | | GTGAAAAAGAGGTTCACCATCTCCAGAGATGATTCAAAAAACACTGCCTATCTACAAATGAACAA |
| | | | | CTTGAAAACTGAGGACACTGCCGTGTACTACTGTGTGAGACATGGGAACTTCGGTAATAGCTACT |
| | | | | TATCCTGGTGGGCTTACTGGGGCCAAGGGACTCTGGTCACCGTCTCCTCA |
| 89 | VL of A2J | artificial | aa | QTVVTQEPSLTVSPGGTVTLTCRSSTGAVTSGYYPNWVQQKPGQAPRGLIGATDMRPSGTPARFS |
| | | | | GSLLGGKAALTLSGVQPEDEAEYYCALWYSNRWVFGGGTKLTVL |
| 90 | VL of A2J | artificial | nt | CAGACTGTTGTGACTCAGGAACCTTCACTCACCGTATCACCTGGTGGAACAGTCACACTCACTTG |
| | | | | TCGCTCCTCGACTGGGGCTGTTACATCTGGCTACTACCCAAACTGGGTCCAACAAAAACCAGGTC |
| | | | | AGGCACCCCGTGGTCTAATAGGTGCCACTGACATGAGGCCCTCTGGTACTCCTGCCAGATTCTCA |
| | | | | GGCTCCCTGCTTGGAGGCAAGGCTGCCCTCACCCTCTCAGGGGTACAGCCAGAGGATGAGGCAGA |
| | | | | ATATTACTGTGCTCTATGGTACAGCAACCGCTGGGTGTTCGGTGGAGGAACCAAACTGACTGTCC |
| | | | | TA |
| 91 | VH-P of A2J | artificial | aa | EVQLLESGGGLVQPGGSLKLSCAASGFTFNVYAMNWVRQAPGKGLEWVARIRSKYNNYATYYADS |
| | | | | VKKRFTISRDDSKNTAYLQMNNLKTEDTAVYYCVRHGNFGNSYLSWWAYWGQGTLVTVSS |
| 92 | VH-P of A2J | artificial | nt | GAGGTGCAGCTGCTCGAGTCTGGAGGAGGATTGGTGCAGCCTGGAGGGTCATTGAAACTCTCATG |
| | | | | TGCAGCCTCTGGATTCACCTTCAATGTCTACGCCATGAACTGGGTCCGCCAGGCTCCAGGAAAGG |
| | | | | GTTTGGAATGGGTTGCTCGCATAAGAAGTAAATATAATAATTATGCAACATATTATGCCGATTCA |
| | | | | GTGAAAAAGAGGTTCACCATCTCCAGAGATGATTCAAAAAACACTGCCTATCTACAAATGAACAA |
| | | | | CTTGAAAACTGAGGACACTGCCGTGTACTACTGTGTGAGACATGGGAACTTCGGTAATAGCTACT |
| | | | | TATCCTGGTGGGCTTACTGGGGCCAAGGGACTCTGGTCACCGTCTCCTCA |
| 93 | VL-P of A2J | artificial | aa | ELVVTQEPSLTVSPGGTVTLTCRSSTGAVTSGYYPNWVQQKPGQAPRGLIGATDMRPSGTPARFS |
| | | | | GSLLGGKAALTLSGVQPEDEAEYYCALWYSNRWVFGGGTKLTVL |
| 91 | VL-P of A2J | artificial | nt | GAGCTCGTTGTGACTCAGGAACCTTCACTCACCGTATCACCTGGTGGAACAGTCACACTCACTTG |
| | | | | TCGCTCCTCGACTGGGGCTGTTACATCTGGCTACTACCCAAACTGGGTCCAACAAAAACCAGGTC |
| | | | | AGGCACCCCGTGGTCTAATAGGTGCCACTGACATGAGGCCCTCTGGTACTCCTGCCAGATTCTCA |
| | | | | GGCTCCCTGCTTGGAGGCAAGGCTGCCCTCACCCTCTCAGGGGTACAGCCAGAGGATGAGGCAGA |
| | | | | ATATTACTGTGCTCTATGGTACAGCAACCGCTGGGTGTTCGGTGGAGGAACCAAACTGACTGTCC |
| | | | | TA |
| 95 | VH-VL of A2J | artificial | aa | EVQLVESGGGLVQPGGSLKLSCAASGFTFNVYAMNWVRQAPGKGLEWVARIRSKYNNYATYYADS |
| | | | | VKKRFTISRDDSKNTAYLQMNNLKTEDTAVYYCVRHGNFGNSYLSWWAYWGQGTLVTVSSGGGGS |
| | | | | GGGGSGGGGSQTVVTQEPSLTVSPGGTVTLTCRSSTGAVTSGYYPNWVQQKPGQAPRGLIGATDM |
| | | | | RPSGTPARFSGSLLGGKAALTLSGVQPEDEAEYYCALWYSNRWVFGGGTKLTVL |
| 96 | VH-VL of A2J | artificial | nt | GAGGTGCAGCTGGTCGAGTCTGGAGGAGGATTGGTGCAGCCTGGAGGGTCATTGAAACTCTCATG |
| | | | | TGCAGCCTCTGGATTCACCTTCAATGTCTACGCCATGAACTGGGTCCGCCAGGCTCCAGGAAAGG |
| | | | | GTTTGGAATGGGTTGCTCGCATAAGAAGTAAATATAATAATTATGCAACATATTATGCCGATTCA |
| | | | | GTGAAAAAGAGGTTCACCATCTCCAGAGATGATTCAAAAAACACTGCCTATCTACAAATGAACAA |
| | | | | CTTGAAAACTGAGGACACTGCCGTGTACTACTGTGTGAGACATGGGAACTTCGGTAATAGCTACT |
| | | | | TATCCTGGTGGGCTTACTGGGGCCAAGGGACTCTGGTCACCGTCTCCTCAGGTGGTGGTGGTTCT |
| | | | | GGCGGCGGCGGCTCCGGTGGTGGTGGTTCTCAGACTGTTGTGACTCAGGAACCTTCACTCACCGT |
| | | | | ATCACCTGGTGGAACAGTCACACTCACTTGTCGCTCCTCGACTGGGGCTGTTACATCTGGCTACT |
| | | | | ACCCAAACTGGGTCCAACAAAAACCAGGTCAGGCACCCCGTGGTCTAATAGGTGCCACTGACATG |
| | | | | AGGCCCTCTGGTACTCCTGCCAGATTCTCAGGCTCCCTGCTTGGAGGCAAGGCTGCCCTCACCCT |
| | | | | CTCAGGGGTACAGCCAGAGGATGAGGCAGAATATTACTGTGCTCTATGGTACAGCAACCGCTGGG |
| | | | | TGTTCGGTGGAGGAACCAAACTGACTGTCCTA |
| 97 | VH-VL-P of A2J | artificial | aa | EVQLLESGGGLVQPGGSLKLSCAASGFTFNVYAMNWVRQAPGKGLEWVARIRSKYNNYATYYADS |
| | | | | VKKRFTISRDDSKNTAYLQMNNLKTEDTAVYYCVRHGNFGNSYLSWWAYWGQGTLVTVSSGGGGS |
| | | | | GGGGSGGGGSELVVTQEPSLTVSPGGTVTLTCRSSTGAVTSGYYPNWVQQKPGQAPRGLIGATDM |
| | | | | RPSGTPARFSGSLLGGKAALTLSGVQPEDEAEYYCALWYSNRWVFGGGTKLTVL |
| 98 | VH-VL-P of A2J | artificial | nt | GAGGTGCAGCTGCTCGAGTCTGGAGGAGGATTGGTGCAGCCTGGAGGGTCATTGAAACTCTCATG |
| | | | | TGCAGCCTCTGGATTCACCTTCAATGTCTACGCCATGAACTGGGTCCGCCAGGCTCCAGGAAAGG |
| | | | | GTTTGGAATGGGTTGCTCGCATAAGAAGTAAATATAATAATTATGCAACATATTATGCCGATTCA |
| | | | | GTGAAAAAGAGGTTCACCATCTCCAGAGATGATTCAAAAAACACTGCCTATCTACAAATGAACAA |
| | | | | CTTGAAAACTGAGGACACTGCCGTGTACTACTGTGTGAGACATGGGAACTTCGGTAATAGCTACT |
| | | | | TATCCTGGTGGGCTTACTGGGGCCAAGGGACTCTGGTCACCGTCTCCTCAGGTGGTGGTGGTTCT |
| | | | | GGCGGCGGCGGCTCCGGTGGTGGTGGTTCTGAGCTCGTTGTGACTCAGGAACCTTCACTCACCGT |
| | | | | ATCACCTGGTGGAACAGTCACACTCACTTGTCGCTCCTCGACTGGGGCTGTTACATCTGGCTACT |
| | | | | ACCCAAACTGGGTCCAACAAAAACCAGGTCAGGCACCCCGTGGTCTAATAGGTGCCACTGACATG |
| | | | | AGGCCCTCTGGTACTCCTGCCAGATTCTCAGGCTCCCTGCTTGGAGGCAAGGCTGCCCTCACCCT |
| | | | | CTCAGGGGTACAGCCAGAGGATGAGGCAGAATATTACTGTGCTCTATGGTACAGCAACCGCTGGG |
| | | | | TGTTCGGTGGAGGAACCAAACTGACTGTCCTA |
| 99 | CDR-L1 of E1L | artificial | aa | GSSTGAVTSGYYPN |
| 100 | CDR-L2 of E1L | artificial | aa | GTKFLAP |
| 101 | CDR-L3 of E1L | artificial | aa | ALWYSNRWV |
| 102 | CDR-H1 of E1L | artificial | aa | KYAMN |
| 103 | CDR-H2 of E1L | artificial | aa | RIRSKYNNYATYYADSVKS |
| 104 | CDR-H3 of E1L | artificial | aa | HGNFGNSYTSYYAY |
| 105 | VH of E1L | artificial | aa | EVQLVESGGGLVQPGGSLKLSCAASGFTFNKYAMNWVRQAPGKGLEWVARIRSKYNNYATYYADS |
| | | | | VKSRFTISRDDSKNTAYLQMNNLKTEDTAVYYCVRHGNFGNSYTSYYAYWGQGTLVTVSS |
| 106 | VH of E1L | artificial | nt | GAGGTGCAGCTGGTCGAGTCTGGAGGAGGATTGGTGCAGCCTGGAGGGTCATTGAAACTCTCATG |
| | | | | TGCAGCCTCTGGATTCACCTTCAATAAGTACGCCATGAACTGGGTCCGCCAGGCTCCAGGAAAGG |
| | | | | GTTTGGAATGGGTTGCTCGCATAAGAAGTAAATATAATAATTATGCAACATATTATGCCGATTCA |
| | | | | GTGAAATCGAGGTTCACCATCTCCAGAGATGATTCAAAAAACACTGCCTATCTACAAATGAACAA |
| | | | | CTTGAAAACTGAGGACACTGCCGTGTACTACTGTGTGAGACATGGGAACTTCGGTAATAGCTACA |
| | | | | CATCCTACTACGCTTACTGGGGCCAAGGGACTCTGGTCACCGTCTCCTCA |
| 107 | VL of E1L | artificial | aa | QTVVTQEPSLTVSPGGTVTLTCGSSTGAVTSGYYPNWVQQKPGQAPRGLIGGTKFLAPGTPARFS |
| | | | | GSLLGGKAALTLSGVQPEDEAEYYCALWYSNRWVFGGGTKLTVL |
| 108 | VL of E1L | artificial | nt | CAGACTGTTGTGACTCAGGAACCTTCACTCACCGTATCACCTGGTGGAACAGTCACACTCACTTG |
| | | | | TGGCTCCTCGACTGGGGCTGTTACATCTGGCTACTACCCAAACTGGGTCCAACAAAAACCAGGTC |
| | | | | AGGCACCCCGTGGTCTAATAGGTGGGACTAAGTTCCTCGCCCCCGGTACTCCTGCCAGATTCTCA |
| | | | | GGCTCCCTGCTTGGAGGCAAGGCTGCCCTCACCCTCTCAGGGGTACAGCCAGAGGATGAGGCAGA |
| | | | | ATATTACTGTGCTCTATGGTACAGCAACCGCTGGGTGTTCGGTGGAGGAACCAAACTGACTGTCC |
| | | | | TA |
| 109 | VH-P of E1L | artificial | aa | EVQLLESGGGLVQPGGSLKLSCAASGFTFNKYAMNWVRQAPGKGLEWVARIRSKYNNYATYYADS |
| | | | | VKSRFTISRDDSKNTAYLQMNNLKTEDTAVYYCVRHGNFGNSYTSYYAYWGQGTLVTVSS |
| 110 | VH-P of E1L | artificial | nt | GAGGTGCAGCTGCTCGAGTCTGGAGGAGGATTGGTGCAGCCTGGAGGGTCATTGAAACTCTCATG |
| | | | | TGCAGCCTCTGGATTCACCTTCAATAAGTACGCCATGAACTGGGTCCGCCAGGCTCCAGGAAAGG |
| | | | | GTTTGGAATGGGTTGCTCGCATAAGAAGTAAATATAATAATTATGCAACATATTATGCCGATTCA |
| | | | | GTGAAATCGAGGTTCACCATCTCCAGAGATGATTCAAAAAACACTGCCTATCTACAAATGAACAA |
| | | | | CTTGAAAACTGAGGACACTGCCGTGTACTACTGTGTGAGACATGGGAACTTCGGTAATAGCTACA |
| | | | | CATCCTACTACGCTTACTGGGGCCAAGGGACTCTGGTCACCGTCTCCTCA |
| 111 | VL-P of E1L | artificial | aa | ELVVTQEPSLTVSPGGTVTLTCGSSTGAVTSGYYPNWVQQKPGQAPRGLIGGTKFLAPGTPARFS |
| | | | | GSLLGGKAALTLSGVQPEDEAEYYCALWYSNRWVFGGGTKLTVL |
| 112 | VL-P of E1L | artificial | nt | GAGCTCGTTGTGACTCAGGAACCTTCACTCACCGTATCACCTGGTGGAACAGTCACACTCACTTG |
| | | | | TGGCTCCTCGACTGGGGCTGTTACATCTGGCTACTACCCAAACTGGGTCCAACAAAAACCAGGTC |
| | | | | AGGCACCCCGTGGTCTAATAGGTGGGACTAAGTTCCTCGCCCCCGGTACTCCTGCCAGATTCTCA |
| | | | | GGCTCCCTGCTTGGAGGCAAGGCTGCCCTCACCCTCTCAGGGGTACAGCCAGAGGATGAGGCAGA |
| | | | | ATATTACTGTGCTCTATGGTACAGCAACCGCTGGGTGTTCGGTGGAGGAACCAAACTGACTGTCC |
| | | | | TA |
| 113 | VH-VL of E1L | artificial | aa | EVQLVESGGGLVQPGGSLKLSCAASGFTFNKYAMNWVRQAPGKGLEWVARIRSKYNNYATYYADS |
| | | | | VKSRFTISRDDSKNTAYLQMNNLKTEDTAVYYCVRHGNFGNSYTSYYAYWGQGTLVTVSSGGGGS |
| | | | | GGGGSGGGGSQTVVTQEPSLTVSPGGTVTLTCGSSTGAVTSGYYPNWVQQKPGQAPRGLIGGTKF |
| | | | | LAPGTPARFSGSLLGGKAALTLSGVQPEDEAEYYCALWYSNRWVFGGGTKLTVL |
| 114 | VH-VL of E1L | artificial | nt | GAGGTGCAGCTGGTCGAGTCTGGAGGAGGATTGGTGCAGCCTGGAGGGTCATTGAAACTCTCATG |
| | | | | TGCAGCCTCTGGATTCACCTTCAATAAGTACGCCATGAACTGGGTCCGCCAGGCTCCAGGAAAGG |
| | | | | GTTTGGAATGGGTTGCTCGCATAAGAAGTAAATATAATAATTATGCAACATATTATGCCGATTCA |
| | | | | GTGAAATCGAGGTTCACCATCTCCAGAGATGATTCAAAAAACACTGCCTATCTACAAATGAACAA |
| | | | | CTTGAAAACTGAGGACACTGCCGTGTACTACTGTGTGAGACATGGGAACTTCGGTAATAGCTACA |
| | | | | CATCCTACTACGCTTACTGGGGCCAAGGGACTCTGGTCACCGTCTCCTCAGGTGGTGGTGGTTCT |
| | | | | GGCGGCGGCGGCTCCGGTGGTGGTGGTTCTCAGACTGTTGTGACTCAGGAACCTTCACTCACCGT |
| | | | | ATCACCTGGTGGAACAGTCACACTCACTTGTGGCTCCTCGACTGGGGCTGTTACATCTGGCTACT |
| | | | | ACCCAAACTGGGTCCAACAAAAACCAGGTCAGGCACCCCGTGGTCTAATAGGTGGGACTAAGTTC |
| | | | | CTCGCCCCCGGTACTCCTGCCAGATTCTCAGGCTCCCTGCTTGGAGGCAAGGCTGCCCTCACCCT |
| | | | | CTCAGGGGTACAGCCAGAGGATGAGGCAGAATATTACTGTGCTCTATGGTACAGCAACCGCTGGG |
| | | | | TGTTCGGTGGAGGAACCAAACTGACTGTCCTA |
| 115 | VH-VL-P of E1L | artificial | aa | EVQLLESGGGLVQPGGSLKLSCAASGFTFNKYAMNWVRQAPGKGLEWVARIRSKYNNYATYYADS |
| | | | | VKSRFTISRDDSKNTAYLQMNNLKTEDTAVYYCVRHGNFGNSYTSYYAYWGQGTLVTVSSGGGGS |
| | | | | GGGGSGGGGSELVVTQEPSLTVSPGGTVTLTCGSSTGAVTSGYYPNWVQQKPGQAPRGLIGGTKF |
| | | | | LAPGTPARFSGSLLGGKAALTLSGVQPEDEAEYYCALWYSNRWVFGGGTKLTVL |
| 116 | VH-VL-P of E1L | artificial | nt | GAGGTGCAGCTGCTCGAGTCTGGAGGAGGATTGGTGCAGCCTGGAGGGTCATTGAAACTCTCATG |
| | | | | TGCAGCCTCTGGATTCACCTTCAATAAGTACGCCATGAACTGGGTCCGCCAGGCTCCAGGAAAGG |
| | | | | GTTTGGAATGGGTTGCTCGCATAAGAAGTAAATATAATAATTATGCAACATATTATGCCGATTCA |
| | | | | GTGAAATCGAGGTTCACCATCTCCAGAGATGATTCAAAAAACACTGCCTATCTACAAATGAACAA |
| | | | | CTTGAAAACTGAGGACACTGCCGTGTACTACTGTGTGAGACATGGGAACTTCGGTAATAGCTACA |
| | | | | CATCCTACTACGCTTACTGGGGCCAAGGGACTCTGGTCACCGTCTCCTCAGGTGGTGGTGGTTCT |
| | | | | GGCGGCGGCGGCTCCGGTGGTGGTGGTTCTGAGCTCGTTGTGACTCAGGAACCTTCACTCACCGT |
| | | | | ATCACCTGGTGGAACAGTCACACTCACTTGTGGCTCCTCGACTGGGGCTGTTACATCTGGCTACT |
| | | | | ACCCAAACTGGGTCCAACAAAAACCAGGTCAGGCACCCCGTGGTCTAATAGGTGGGACTAAGTTC |
| | | | | CTCGCCCCCGGTACTCCTGCCAGATTCTCAGGCTCCCTGCTTGGAGGCAAGGCTGCCCTCACCCT |
| | | | | CTCAGGGGTACAGCCAGAGGATGAGGCAGAATATTACTGTGCTCTATGGTACAGCAACCGCTGGG |
| | | | | TGTTCGGTGGAGGAACCAAACTGACTGTCCTA |
| 117 | CDR-L1 of E2M | artificial | aa | RSSTGAVTSGYYPN |
| 118 | CDR-L2 of E2M | artificial | aa | ATDMRPS |
| 119 | CDR-L3 of E2M | artificial | aa | ALWYSNRWV |
| 120 | CDR-H1 of E2M | artificial | aa | GYAMN |
| 121 | CDR-H2 of E2M | artificial | aa | RIRSKYNNYATYYADSVKE |
| 122 | CDR-H3 of E2M | artificial | aa | HRNFGNSYLSWFAY |
| 123 | VH of E2M | artificial | aa | EVQLVESGGGLVQPGGSLKLSCAASGFTFNGYAMNWVRQAPGKGLEWVARIRSKYNNYATYYADS |
| | | | | VKERFTISRDDSKNTAYLQMNNLKTEDTAVYYCVRHRNFGNSYLSWFAYWGQGTLVTVSS |
| 124 | VH of E2M | artificial | nt | GAGGTGCAGCTGGTCGAGTCTGGAGGAGGATTGGTGCAGCCTGGAGGGTCATTGAAACTCTCATG |
| | | | | TGCAGCCTCTGGATTCACCTTCAATGGCTACGCCATGAACTGGGTCCGCCAGGCTCCAGGAAAGG |
| | | | | GTTTGGAATGGGTTGCTCGCATAAGAAGTAAATATAATAATTATGCAACATATTATGCCGATTCA |
| | | | | GTGAAAGAGAGGTTCACCATCTCCAGAGATGATTCAAAAAACACTGCCTATCTACAAATGAACAA |
| | | | | CTTGAAAACTGAGGACACTGCCGTGTACTACTGTGTGAGACATAGGAACTTCGGTAATAGCTACT |
| | | | | TATCCTGGTTCGCTTACTGGGGCCAAGGGACTCTGGTCACCGTCTCCTCA |
| 125 | VL of E2M | artificial | aa | QTVVTQEPSLTVSPGGTVTLTCRSSTGAVTSGYYPNWVQQKPGQAPRGLIGATDMRPSGTPARFS |
| | | | | GSLLGGKAALTLSGVQPEDEAEYYCALWYSNRWVFGGGTKLTVL |
| 126 | VL of E2M | artificial | nt | CAGACTGTTGTGACTCAGGAACCTTCACTCACCGTATCACCTGGTGGAACAGTCACACTCACTTG |
| | | | | TCGCTCCTCGACTGGGGCTGTTACATCTGGCTACTACCCAAACTGGGTCCAACAAAAACCAGGTC |
| | | | | AGGCACCCCGTGGTCTAATAGGTGCCACTGACATGAGGCCCTCTGGTACTCCTGCCAGATTCTCA |
| | | | | GGCTCCCTGCTTGGAGGCAAGGCTGCCCTCACCCTCTCAGGGGTACAGCCAGAGGATGAGGCAGA |
| | | | | ATATTACTGTGCTCTATGGTACAGCAACCGCTGGGTGTTCGGTGGAGGAACCAAACTGACTGTCC |
| | | | | TA |
| 127 | VH-P of E2M | artificial | aa | EVQLLESGGGLVQPGGSLKLSCAASGFTFNGYAMNWVRQAPGKGLEWVARIRSKYNNYATYYADS |
| | | | | VKERFTISRDDSKNTAYLQMNNLKTEDTAVYYCVRHRNFGNSYLSWFAYWGQGTLVTVSS |
| 128 | VH-P of E2M | artificial | nt | GAGGTGCAGCTGCTCGAGTCTGGAGGAGGATTGGTGCAGCCTGGAGGGTCATTGAAACTCTCATG |
| | | | | TGCAGCCTCTGGATTCACCTTCAATGGCTACGCCATGAACTGGGTCCGCCAGGCTCCAGGAAAGG |
| | | | | GTTTGGAATGGGTTGCTCGCATAAGAAGTAAATATAATAATTATGCAACATATTATGCCGATTCA |
| | | | | GTGAAAGAGAGGTTCACCATCTCCAGAGATGATTCAAAAAACACTGCCTATCTACAAATGAACAA |
| | | | | CTTGAAAACTGAGGACACTGCCGTGTACTACTGTGTGAGACATAGGAACTTCGGTAATAGCTACT |
| | | | | TATCCTGGTTCGCTTACTGGGGCCAAGGGACTCTGGTCACCGTCTCCTCA |
| 129 | VL-P of E2M | artificial | aa | ELVVTQEPSLTVSPGGTVTLTCRSSTGAVTSGYYPNWVQQKPGQAPRGLIGATDMRPSGTPARFS |
| | | | | GSLLGGKAALTLSGVQPEDEAEYYCALWYSNRWVFGGGTKLTVL |
| 130 | VL-P of E2M | artificial | nt | GAGCTCGTTGTGACTCAGGAACCTTCACTCACCGTATCACCTGGTGGAACAGTCACACTCACTTG |
| | | | | TCGCTCCTCGACTGGGGCTGTTACATCTGGCTACTACCCAAACTGGGTCCAACAAAAACCAGGTC |
| | | | | AGGCACCCCGTGGTCTAATAGGTGCCACTGACATGAGGCCCTCTGGTACTCCTGCCAGATTCTCA |
| | | | | GGCTCCCTGCTTGGAGGCAAGGCTGCCCTCACCCTCTCAGGGGTACAGCCAGAGGATGAGGCAGA |
| | | | | ATATTACTGTGCTCTATGGTACAGCAACCGCTGGGTGTTCGGTGGAGGAACCAAACTGACTGTCC |
| | | | | TA |
| 131 | VH-VL of E2M | artificial | aa | EVQLVESGGGLVQPGGSLKLSCAASGFTFNGYAMNWVRQAPGKGLEWVARIRSKYNNYATYYADS |
| | | | | VKERFTISRDDSKNTAYLQMNNLKTEDTAVYYCVRHRNFGNSYLSWFAYWGQGTLVTVSSGGGGS |
| | | | | GGGGSGGGGSQTVVTQEPSLTVSPGGTVTLTCRSSTGAVTSGYYPNWVQQKPGQAPRGLIGATDM |
| | | | | RPSGTPARFSGSLLGGKAALTLSGVQPEDEAEYYCALWYSNRWVFGGGTKLTVL |
| 132 | VH-VL of E2M | artificial | nt | GAGGTGCAGCTGGTCGAGTCTGGAGGAGGATTGGTGCAGCCTGGAGGGTCATTGAAACTCTCATG |
| | | | | TGCAGCCTCTGGATTCACCTTCAATGGCTACGCCATGAACTGGGTCCGCCAGGCTCCAGGAAAGG |
| | | | | GTTTGGAATGGGTTGCTCGCATAAGAAGTAAATATAATAATTATGCAACATATTATGCCGATTCA |
| | | | | GTGAAAGAGAGGTTCACCATCTCCAGAGATGATTCAAAAAACACTGCCTATCTACAAATGAACAA |
| | | | | CTTGAAAACTGAGGACACTGCCGTGTACTACTGTGTGAGACATAGGAACTTCGGTAATAGCTACT |
| | | | | TATCCTGGTTCGCTTACTGGGGCCAAGGGACTCTGGTCACCGTCTCCTCAGGTGGTGGTGGTTCT |
| | | | | GGCGGCGGCGGCTCCGGTGGTGGTGGTTCTCAGACTGTTGTGACTCAGGAACCTTCACTCACCGT |
| | | | | ATCACCTGGTGGAACAGTCACACTCACTTGTCGCTCCTCGACTGGGGCTGTTACATCTGGCTACT |
| | | | | ACCCAAACTGGGTCCAACAAAAACCAGGTCAGGCACCCCGTGGTCTAATAGGTGCCACTGACATG |
| | | | | AGGCCCTCTGGTACTCCTGCCAGATTCTCAGGCTCCCTGCTTGGAGGCAAGGCTGCCCTCACCCT |
| | | | | CTCAGGGGTACAGCCAGAGGATGAGGCAGAATATTACTGTGCTCTATGGTACAGCAACCGCTGGG |
| | | | | TGTTCGGTGGAGGAACCAAACTGACTGTCCTA |
| 133 | VH-VL-P of E2M | artificial | aa | EVQLLESGGGLVQPGGSLKLSCAASGFTFNGYAMNWVRQAPGKGLEWVARIRSKYNNYATYYADS |
| | | | | VKERFTISRDDSKNTAYLQMNNLKTEDTAVYYCVRHRNFGNSYLSWFAYWGQGTLVTVSSGGGGS |
| | | | | GGGGSGGGGSELVVTQEPSLTVSPGGTVTLTCRSSTGAVTSGYYPNWVQQKPGQAPRGLIGATDM |
| | | | | RPSGTPARFSGSLLGGKAALTLSGVQPEDEAEYYCALWYSNRWVFGGGTKLTVL |
| 134 | VH-VL-P of E2M | artificial | nt | GAGGTGCAGCTGCTCGAGTCTGGAGGAGGATTGGTGCAGCCTGGAGGGTCATTGAAACTCTCATG |
| | | | | TGCAGCCTCTGGATTCACCTTCAATGGCTACGCCATGAACTGGGTCCGCCAGGCTCCAGGAAAGG |
| | | | | GTTTGGAATGGGTTGCTCGCATAAGAAGTAAATATAATAATTATGCAACATATTATGCCGATTCA |
| | | | | GTGAAAGAGAGGTTCACCATCTCCAGAGATGATTCAAAAAACACTGCCTATCTACAAATGAACAA |
| | | | | CTTGAAAACTGAGGACACTGCCGTGTACTACTGTGTGAGACATAGGAACTTCGGTAATAGCTACT |
| | | | | TATCCTGGTTCGCTTACTGGGGCCAAGGGACTCTGGTCACCGTCTCCTCAGGTGGTGGTGGTTCT |
| | | | | GGCGGCGGCGGCTCCGGTGGTGGTGGTTCTGAGCTCGTTGTGACTCAGGAACCTTCACTCACCGT |
| | | | | ATCACCTGGTGGAACAGTCACACTCACTTGTCGCTCCTCGACTGGGGCTGTTACATCTGGCTACT |
| | | | | ACCCAAACTGGGTCCAACAAAAACCAGGTCAGGCACCCCGTGGTCTAATAGGTGCCACTGACATG |
| | | | | AGGCCCTCTGGTACTCCTGCCAGATTCTCAGGCTCCCTGCTTGGAGGCAAGGCTGCCCTCACCCT |
| | | | | CTCAGGGGTACAGCCAGAGGATGAGGCAGAATATTACTGTGCTCTATGGTACAGCAACCGCTGGG |
| | | | | TGTTCGGTGGAGGAACCAAACTGACTGTCCTA |
| 135 | CDR-L1 of F7O | artificial | aa | GSSTGAVTSGYYPN |
| 136 | CDR-L2 of F7O | artificial | aa | GTKFLAP |
| 137 | CDR-L3 of F7O | artificial | aa | ALWYSNRWV |
| 138 | CDR-H1 of F7O | artificial | aa | VYAMN |
| 139 | CDR-H2 of F7O | artificial | aa | RIRSKYNNYATYYADSVKK |
| 140 | CDR-H3 of F7O | artificial | aa | HGNFGNSYISWWAY |
| 141 | VH of F7O | artificial | aa | EVQLVESGGGLVQPGGSLKLSCAASGFTFNVYAMNWVRQAPGKGLEWVARIRSKYNNYATYYADS |
| | | | | VKKRFTISRDDSKNTAYLQMNNLKTEDTAVYYCVRHGNFGNSYISWWAYWGQGTLVTVSS |
| 142 | VH of F7O | artificial | nt | GAGGTGCAGCTGGTCGAGTCTGGAGGAGGATTGGTGCAGCCTGGAGGGTCATTGAAACTCTCATG |
| | | | | TGCAGCCTCTGGATTCACCTTCAATGTGTACGCCATGAACTGGGTCCGCCAGGCTCCAGGAAAGG |
| | | | | GTTTGGAATGGGTTGCTCGCATAAGAAGTAAATATAATAATTATGCAACATATTATGCCGATTCA |
| | | | | GTGAAAAAGAGGTTCACCATCTCCAGAGATGATTCAAAAAACACTGCCTATCTACAAATGAACAA |
| | | | | CTTGAAAACTGAGGACACTGCCGTGTACTACTGTGTGAGACATGGGAACTTCGGTAATAGCTACA |
| | | | | TATCCTGGTGGGCTTACTGGGGCCAAGGGACTCTGGTCACCGTCTCCTCA |
| 143 | VL of F7O | artificial | aa | QTVVTQEPSLTVSPGGTVTLTCGSSTGAVTSGYYPNWVQQKPGQAPRGLIGGTKFLAPGTPARFS |
| | | | | GSLLGGKAALTLSGVQPEDEAEYYCALWYSNRWVFGGGTKLTVL |
| 144 | VL of F7O | artificial | nt | CAGACTGTTGTGACTCAGGAACCTTCACTCACCGTATCACCTGGTGGAACAGTCACACTCACTTG |
| | | | | TGGCTCCTCGACTGGGGCTGTTACATCTGGCTACTACCCAAACTGGGTCCAACAAAAACCAGGTC |
| | | | | AGGCACCCCGTGGTCTAATAGGTGGGACTAAGTTCCTCGCCCCCGGTACTCCTGCCAGATTCTCA |
| | | | | GGCTCCCTGCTTGGAGGCAAGGCTGCCCTCACCCTCTCAGGGGTACAGCCAGAGGATGAGGCAGA |
| | | | | ATATTACTGTGCTCTATGGTACAGCAACCGCTGGGTGTTCGGTGGAGGAACCAAACTGACTGTCC |
| | | | | TA |
| 145 | VH-P of F7O | artificial | aa | EVQLLESGGGLVQPGGSLKLSCAASGFTFNVYAMNWVRQAPGKGLEWVARIRSKYNNYATYYADS |
| | | | | VKKRFTISRDDSKNTAYLQMNNLKTEDTAVYYCVRHGNFGNSYISWWAYWGQGTLVTVSS |
| 146 | VH-P of F7O | artificial | nt | GAGGTGCAGCTGCTCGAGTCTGGAGGAGGATTGGTGCAGCCTGGAGGGTCATTGAAACTCTCATG |
| | | | | TGCAGCCTCTGGATTCACCTTCAATGTGTACGCCATGAACTGGGTCCGCCAGGCTCCAGGAAAGG |
| | | | | GTTTGGAATGGGTTGCTCGCATAAGAAGTAAATATAATAATTATGCAACATATTATGCCGATTCA |
| | | | | GTGAAAAAGAGGTTCACCATCTCCAGAGATGATTCAAAAAACACTGCCTATCTACAAATGAACAA |
| | | | | CTTGAAAACTGAGGACACTGCCGTGTACTACTGTGTGAGACATGGGAACTTCGGTAATAGCTACA |
| | | | | TATCCTGGTGGGCTTACTGGGGCCAAGGGACTCTGGTCACCGTCTCCTCA |
| 147 | VL-P of F7O | artificial | aa | ELVVTQEPSLTVSPGGTVTLTCGSSTGAVTSGYYPNWVQQKPGQAPRGLIGGTKFLAPGTPARFS |
| | | | | GSLLGGKAALTLSGVQPEDEAEYYCALWYSNRWVFGGGTKLTVL |
| 148 | VL-P of F7O | artificial | nt | GAGCTCGTTGTGACTCAGGAACCTTCACTCACCGTATCACCTGGTGGAACAGTCACACTCACTTG |
| | | | | TGGCTCCTCGACTGGGGCTGTTACATCTGGCTACTACCCAAACTGGGTCCAACAAAAACCAGGTC |
| | | | | AGGCACCCCGTGGTCTAATAGGTGGGACTAAGTTCCTCGCCCCCGGTACTCCTGCCAGATTCTCA |
| | | | | GGCTCCCTGCTTGGAGGCAAGGCTGCCCTCACCCTCTCAGGGGTACAGCCAGAGGATGAGGCAGA |
| | | | | ATATTACTGTGCTCTATGGTACAGCAACCGCTGGGTGTTCGGTGGAGGAACCAAACTGACTGTCC |
| | | | | TA |
| 149 | VH-VL of F7O | artificial | aa | EVQLVESGGGLVQPGGSLKLSCAASGFTFNVYAMNWVRQAPGKGLEWVARIRSKYNNYATYYADS |
| | | | | VKKRFTISRDDSKNTAYLQMNNLKTEDTAVYYCVRHGNFGNSYISWWAYWGQGTLVTVSSGGGGS |
| | | | | GGGGSGGGGSQTVVTQEPSLTVSPGGTVTLTCGSSTGAVTSGYYPNWVQQKPGQAPRGLIGGTKF |
| | | | | LAPGTPARFSGSLLGGKAALTLSGVQPEDEAEYYCALWYSNRWVFGGGTKLTVL |
| 150 | VH-VL of F7O | artificial | nt | GAGGTGCAGCTGGTCGAGTCTGGAGGAGGATTGGTGCAGCCTGGAGGGTCATTGAAACTCTCATG |
| | | | | TGCAGCCTCTGGATTCACCTTCAATGTGTACGCCATGAACTGGGTCCGCCAGGCTCCAGGAAAGG |
| | | | | GTTTGGAATGGGTTGCTCGCATAAGAAGTAAATATAATAATTATGCAACATATTATGCCGATTCA |
| | | | | GTGAAAAAGAGGTTCACCATCTCCAGAGATGATTCAAAAAACACTGCCTATCTACAAATGAACAA |
| | | | | CTTGAAAACTGAGGACACTGCCGTGTACTACTGTGTGAGACATGGGAACTTCGGTAATAGCTACA |
| | | | | TATCCTGGTGGGCTTACTGGGGCCAAGGGACTCTGGTCACCGTCTCCTCAGGTGGTGGTGGTTCT |
| | | | | GGCGGCGGCGGCTCCGGTGGTGGTGGTTCTCAGACTGTTGTGACTCAGGAACCTTCACTCACCGT |
| | | | | ATCACCTGGTGGAACAGTCACACTCACTTGTGGCTCCTCGACTGGGGCTGTTACATCTGGCTACT |
| | | | | ACCCAAACTGGGTCCAACAAAAACCAGGTCAGGCACCCCGTGGTCTAATAGGTGGGACTAAGTTC |
| | | | | CTCGCCCCCGGTACTCCTGCCAGATTCTCAGGCTCCCTGCTTGGAGGCAAGGCTGCCCTCACCCT |
| | | | | CTCAGGGGTACAGCCAGAGGATGAGGCAGAATATTACTGTGCTCTATGGTACAGCAACCGCTGGG |
| | | | | TGTTCGGTGGAGGAACCAAACTGACTGTCCTA |
| 151 | VH-VL-P of F7O | artificial | aa | EVQLLESGGGLVQPGGSLKLSCAASGFTFNVYAMNWVRQAPGKGLEWVARIRSKYNNYATYYADS |
| | | | | VKKRFTISRDDSKNTAYLQMNNLKTEDTAVYYCVRHGNFGNSYISWWAYWGQGTLVTVSSGGGGS |
| | | | | GGGGSGGGGSELVVTQEPSLTVSPGGTVTLTCGSSTGAVTSGYYPNWVQQKPGQAPRGLIGGTKF |
| | | | | LAPGTPARFSGSLLGGKAALTLSGVQPEDEAEYYCALWYSNRWVFGGGTKLTVL |
| 152 | VH-VL-P of F7O | artificial | nt | GAGGTGCAGCTGCTCGAGTCTGGAGGAGGATTGGTGCAGCCTGGAGGGTCATTGAAACTCTCATG |
| | | | | TGCAGCCTCTGGATTCACCTTCAATGTGTACGCCATGAACTGGGTCCGCCAGGCTCCAGGAAAGG |
| | | | | GTTTGGAATGGGTTGCTCGCATAAGAAGTAAATATAATAATTATGCAACATATTATGCCGATTCA |
| | | | | GTGAAAAAGAGGTTCACCATCTCCAGAGATGATTCAAAAAACACTGCCTATCTACAAATGAACAA |
| | | | | CTTGAAAACTGAGGACACTGCCGTGTACTACTGTGTGAGACATGGGAACTTCGGTAATAGCTACA |
| | | | | TATCCTGGTGGGCTTACTGGGGCCAAGGGACTCTGGTCACCGTCTCCTCAGGTGGTGGTGGTTCT |
| | | | | GGCGGCGGCGGCTCCGGTGGTGGTGGTTCTGAGCTCGTTGTGACTCAGGAACCTTCACTCACCGT |
| | | | | ATCACCTGGTGGAACAGTCACACTCACTTGTGGCTCCTCGACTGGGGCTGTTACATCTGGCTACT |
| | | | | ACCCAAACTGGGTCCAACAAAAACCAGGTCAGGCACCCCGTGGTCTAATAGGTGGGACTAAGTTC |
| | | | | CTCGCCCCCGGTACTCCTGCCAGATTCTCAGGCTCCCTGCTTGGAGGCAAGGCTGCCCTCACCCT |
| | | | | CTCAGGGGTACAGCCAGAGGATGAGGCAGAATATTACTGTGCTCTATGGTACAGCAACCGCTGGG |
| | | | | TGTTCGGTGGAGGAACCAAACTGACTGTCCTA |
| 153 | CDR-L1 of F12Q | artificial | aa | GSSTGAVTSGNYPN |
| 154 | CDR-L2 of F12Q | artificial | aa | GTKFLAP |
| 155 | CDR-L3 of F12Q | artificial | aa | VLWYSNRWV |
| 156 | CDR-H1 of F12Q | artificial | aa | SYAMN |
| 157 | CDR-H2 of F12Q | artificial | aa | RIRSKYNNYATYYADSVKG |
| 158 | CDR-H3 of F12Q | artificial | aa | HGNFGNSYVSWWAY |
| 159 | VH of F12Q | artificial | aa | EVQLVESGGGLVQPGGSLKLSCAASGFTFNSYAMNWVRQAPGKGLEWVARIRSKYNNYATYYADS |
| | | | | VKGRFTISRDDSKNTAYLQMNNLKTEDTAVYYCVRHGNFGNSYVSWWAYWGQGTLVTVSS |
| 160 | VH of F12Q | artificial | nt | GAGGTGCAGCTGGTCGAGTCTGGAGGAGGATTGGTGCAGCCTGGAGGGTCATTGAAACTCTCATG |
| | | | | TGCAGCCTCTGGATTCACCTTCAATAGCTACGCCATGAACTGGGTCCGCCAGGCTCCAGGAAAGG |
| | | | | GTTTGGAATGGGTTGCTCGCATAAGAAGTAAATATAATAATTATGCAACATATTATGCCGATTCA |
| | | | | GTGAAAGGCAGGTTCACCATCTCCAGAGATGATTCAAAAAACACTGCCTATCTACAAATGAACAA |
| | | | | CTTGAAAACTGAGGACACTGCCGTGTACTACTGTGTGAGACATGGGAACTTCGGTAATAGCTACG |
| | | | | TTTCCTGGTGGGCTTACTGGGGCCAAGGGACTCTGGTCACCGTCTCCTCA |
| 161 | VL of F12Q | artificial | aa | QTVVTQEPSLTVSPGGTVTLTCGSSTGAVTSGNYPNWVQQKPGQAPRGLIGGTKFLAPGTPARFS |
| | | | | GSLLGGKAALTLSGVQPEDEAEYYCVLWYSNRWVFGGGTKLTVL |
| 162 | VL of F12Q | artificial | nt | CAGACTGTTGTGACTCAGGAACCTTCACTCACCGTATCACCTGGTGGAACAGTCACACTCACTTG |
| | | | | TGGCTCCTCGACTGGGGCTGTTACATCTGGCAACTACCCAAACTGGGTCCAACAAAAACCAGGTC |
| | | | | AGGCACCCCGTGGTCTAATAGGTGGGACTAAGTTCCTCGCCCCCGGTACTCCTGCCAGATTCTCA |
| | | | | GGCTCCCTGCTTGGAGGCAAGGCTGCCCTCACCCTCTCAGGGGTACAGCCAGAGGATGAGGCAGA |
| | | | | ATATTACTGTGTTCTATGGTACAGCAACCGCTGGGTGTTCGGTGGAGGAACCAAACTGACTGTCC |
| | | | | TA |
| 163 | VH-P of F12Q | artificial | aa | EVQLLESGGGLVQPGGSLKLSCAASGFTFNSYAMNWVRQAPGKGLEWVARIRSKYNNYATYYADS |
| | | | | VKGRFTISRDDSKNTAYLQMNNLKTEDTAVYYCVRHGNFGNSYVSWWAYWGQGTLVTVSS |
| 164 | VH-P of F12Q | artificial | nt | GAGGTGCAGCTGCTCGAGTCTGGAGGAGGATTGGTGCAGCCTGGAGGGTCATTGAAACTCTCATG |
| | | | | TGCAGCCTCTGGATTCACCTTCAATAGCTACGCCATGAACTGGGTCCGCCAGGCTCCAGGAAAGG |
| | | | | GTTTGGAATGGGTTGCTCGCATAAGAAGTAAATATAATAATTATGCAACATATTATGCCGATTCA |
| | | | | GTGAAAGGCAGGTTCACCATCTCCAGAGATGATTCAAAAAACACTGCCTATCTACAAATGAACAA |
| | | | | CTTGAAAACTGAGGACACTGCCGTGTACTACTGTGTGAGACATGGGAACTTCGGTAATAGCTACG |
| | | | | TTTCCTGGTGGGCTTACTGGGGCCAAGGGACTCTGGTCACCGTCTCCTCA |
| 165 | VL-P of F12Q | artificial | aa | ELVVTQEPSLTVSPGGTVTLTCGSSTGAVTSGNYPNWVQQKPGQAPRGLIGGTKFLAPGTPARFS |
| | | | | GSLLGGKAALTLSGVQPEDEAEYYCVLWYSNRWVFGGGTKLTVL |
| 166 | VL-P of F12Q | artificial | nt | GAGCTCGTTGTGACTCAGGAACCTTCACTCACCGTATCACCTGGTGGAACAGTCACACTCACTTG |
| | | | | TGGCTCCTCGACTGGGGCTGTTACATCTGGCAACTACCCAAACTGGGTCCAACAAAAACCAGGTC |
| | | | | AGGCACCCCGTGGTCTAATAGGTGGGACTAAGTTCCTCGCCCCCGGTACTCCTGCCAGATTCTCA |
| | | | | GGCTCCCTGCTTGGAGGCAAGGCTGCCCTCACCCTCTCAGGGGTACAGCCAGAGGATGAGGCAGA |
| | | | | ATATTACTGTGTTCTATGGTACAGCAACCGCTGGGTGTTCGGTGGAGGAACCAAACTGACTGTCC |
| | | | | TA |
| 167 | VH-VL of F12Q | artificial | aa | EVQLVESGGGLVQPGGSLKLSCAASGFTFNSYAMNWVRQAPGKGLEWVARIRSKYNNYATYYADS |
| | | | | VKGRFTISRDDSKNTAYLQMNNLKTEDTAVYYCVRHGNFGNSYVSWWAYWGQGTLVTVSSGGGGS |
| | | | | GGGGSGGGGSQTVVTQEPSLTVSPGGTVTLTCGSSTGAVTSGNYPNWVQQKPGQAPRGLIGGTKF |
| | | | | LAPGTPARFSGSLLGGKAALTLSGVQPEDEAEYYCVLWYSNRWVFGGGTKLTVL |
| 168 | VH-VL of F12Q | artificial | nt | GAGGTGCAGCTGGTCGAGTCTGGAGGAGGATTGGTGCAGCCTGGAGGGTCATTGAAACTCTCATG |
| | | | | TGCAGCCTCTGGATTCACCTTCAATAGCTACGCCATGAACTGGGTCCGCCAGGCTCCAGGAAAGG |
| | | | | GTTTGGAATGGGTTGCTCGCATAAGAAGTAAATATAATAATTATGCAACATATTATGCCGATTCA |
| | | | | GTGAAAGGCAGGTTCACCATCTCCAGAGATGATTCAAAAAACACTGCCTATCTACAAATGAACAA |
| | | | | CTTGAAAACTGAGGACACTGCCGTGTACTACTGTGTGAGACATGGGAACTTCGGTAATAGCTACG |
| | | | | TTTCCTGGTGGGCTTACTGGGGCCAAGGGACTCTGGTCACCGTCTCCTCAGGTGGTGGTGGTTCT |
| | | | | GGCGGCGGCGGCTCCGGTGGTGGTGGTTCTCAGACTGTTGTGACTCAGGAACCTTCACTCACCGT |
| | | | | ATCACCTGGTGGAACAGTCACACTCACTTGTGGCTCCTCGACTGGGGCTGTTACATCTGGCAACT |
| | | | | ACCCAAACTGGGTCCAACAAAAACCAGGTCAGGCACCCCGTGGTCTAATAGGTGGGACTAAGTTC |
| | | | | CTCGCCCCCGGTACTCCTGCCAGATTCTCAGGCTCCCTGCTTGGAGGCAAGGCTGCCCTCACCCT |
| | | | | CTCAGGGGTACAGCCAGAGGATGAGGCAGAATATTACTGTGTTCTATGGTACAGCAACCGCTGGG |
| | | | | TGTTCGGTGGAGGAACCAAACTGACTGTCCTA |
| 169 | VH-VL-P of F12Q | artificial | aa | EVQLLESGGGLVQPGGSLKLSCAASGFTFNSYAMNWVRQAPGKGLEWVARIRSKYNNYATYYADS |
| | | | | VKGRFTISRDDSKNTAYLQMNNLKTEDTAVYYCVRHGNFGNSYVSWWAYWGQGTLVTVSSGGGGS |
| | | | | GGGGSGGGGSELVVTQEPSLTVSPGGTVTLTCGSSTGAVTSGNYPNWVQQKPGQAPRGLIGGTKF |
| | | | | LAPGTPARFSGSLLGGKAALTLSGVQPEDEAEYYCVLWYSNRWVFGGGTKLTVL |
| 170 | VH-VL-P of F12Q | artificial | nt | GAGGTGCAGCTGCTCGAGTCTGGAGGAGGATTGGTGCAGCCTGGAGGGTCATTGAAACTCTCATG |
| | | | | TGCAGCCTCTGGATTCACCTTCAATAGCTACGCCATGAACTGGGTCCGCCAGGCTCCAGGAAAGG |
| | | | | GTTTGGAATGGGTTGCTCGCATAAGAAGTAAATATAATAATTATGCAACATATTATGCCGATTCA |
| | | | | GTGAAAGGCAGGTTCACCATCTCCAGAGATGATTCAAAAAACACTGCCTATCTACAAATGAACAA |
| | | | | CTTGAAAACTGAGGACACTGCCGTGTACTACTGTGTGAGACATGGGAACTTCGGTAATAGCTACG |
| | | | | TTTCCTGGTGGGCTTACTGGGGCCAAGGGACTCTGGTCACCGTCTCCTCAGGTGGTGGTGGTTCT |
| | | | | GGCGGCGGCGGCTCCGGTGGTGGTGGTTCTGAGCTCGTTGTGACTCAGGAACCTTCACTCACCGT |
| | | | | ATCACCTGGTGGAACAGTCACACTCACTTGTGGCTCCTCGACTGGGGCTGTTACATCTGGCAACT |
| | | | | ACCCAAACTGGGTCCAACAAAAACCAGGTCAGGCACCCCGTGGTCTAATAGGTGGGACTAAGTTC |
| | | | | CTCGCCCCCGGTACTCCTGCCAGATTCTCAGGCTCCCTGCTTGGAGGCAAGGCTGCCCTCACCCT |
| | | | | CTCAGGGGTACAGCCAGAGGATGAGGCAGAATATTACTGTGTTCTATGGTACAGCAACCGCTGGG |
| | | | | TGTTCGGTGGAGGAACCAAACTGACTGTCCTA |
| 171 | CDR-L1 of I2C | artificial | aa | GSSTGAVTSGNYPN |
| 172 | CDR-L2 of I2C | artificial | aa | GTKFLAP |
| 173 | CDR-L3 of I2C | artificial | aa | VLWYSNRWV |
| 174 | CDR-H1 of I2C | artificial | aa | KYAMN |
| 175 | CDR-H2 of I2C | artificial | aa | RIRSKYNNYATYYADSVKD |
| 176 | CDR-H3 of I2C | artificial | aa | HGNFGNSYISYWAY |
| 177 | VH of I2C | artificial | aa | EVQLVESGGGLVQPGGSLKLSCAASGFTFNKYAMNWVRQAPGKGLEWVARIRSKYNNYATYYADS |
| | | | | VKDRFTISRDDSKNTAYLQMNNLKTEDTAVYYCVRHGNFGNSYISYWAYWGQGTLVTVSS |
| 178 | VH of I2C | artificial | nt | GAGGTGCAGCTGGTCGAGTCTGGAGGAGGATTGGTGCAGCCTGGAGGGTCATTGAAACTCTCATG |
| | | | | TGCAGCCTCTGGATTCACCTTCAATAAGTACGCCATGAACTGGGTCCGCCAGGCTCCAGGAAAGG |
| | | | | GTTTGGAATGGGTTGCTCGCATAAGAAGTAAATATAATAATTATGCAACATATTATGCCGATTCA |
| | | | | GTGAAAGACAGGTTCACCATCTCCAGAGATGATTCAAAAAACACTGCCTATCTACAAATGAACAA |
| | | | | CTTGAAAACTGAGGACACTGCCGTGTACTACTGTGTGAGACATGGGAACTTCGGTAATAGCTACA |
| | | | | TATCCTACTGGGCTTACTGGGGCCAAGGGACTCTGGTCACCGTCTCCTCA |
| 179 | VL of I2C | artificial | aa | QTVVTQEPSLTVSPGGTVTLTCGSSTGAVTSGNYPNWVQQKPGQAPRGLIGGTKFLAPGTPARFS |
| | | | | GSLLGGKAALTLSGVQPEDEAEYYCVLWYSNRWVFGGGTKLTVL |
| 180 | VL of I2C | artificial | nt | CAGACTGTTGTGACTCAGGAACCTTCACTCACCGTATCACCTGGTGGAACAGTCACACTCACTTG |
| | | | | TGGCTCCTCGACTGGGGCTGTTACATCTGGCAACTACCCAAACTGGGTCCAACAAAAACCAGGTC |
| | | | | AGGCACCCCGTGGTCTAATAGGTGGGACTAAGTTCCTCGCCCCCGGTACTCCTGCCAGATTCTCA |
| | | | | GGCTCCCTGCTTGGAGGCAAGGCTGCCCTCACCCTCTCAGGGGTACAGCCAGAGGATGAGGCAGA |
| | | | | ATATTACTGTGTTCTATGGTACAGCAACCGCTGGGTGTTCGGTGGAGGAACCAAACTGACTGTCC |
| | | | | TA |
| 181 | VH-P of I2C | artificial | aa | EVQLLESGGGLVQPGGSLKLSCAASGFTFNKYAMNWVRQAPGKGLEWVARIRSKYNNYATYYADS |
| | | | | VKDRFTISRDDSKNTAYLQMNNLKTEDTAVYYCVRHGNFGNSYISYWAYWGQGTLVTVSS |
| 182 | VH-P of I2C | artificial | nt | GAGGTGCAGCTGCTCGAGTCTGGAGGAGGATTGGTGCAGCCTGGAGGGTCATTGAAACTCTCATG |
| | | | | TGCAGCCTCTGGATTCACCTTCAATAAGTACGCCATGAACTGGGTCCGCCAGGCTCCAGGAAAGG |
| | | | | GTTTGGAATGGGTTGCTCGCATAAGAAGTAAATATAATAATTATGCAACATATTATGCCGATTCA |
| | | | | GTGAAAGACAGGTTCACCATCTCCAGAGATGATTCAAAAAACACTGCCTATCTACAAATGAACAA |
| | | | | CTTGAAAACTGAGGACACTGCCGTGTACTACTGTGTGAGACATGGGAACTTCGGTAATAGCTACA |
| | | | | TATCCTACTGGGCTTACTGGGGCCAAGGGACTCTGGTCACCGTCTCCTCA |
| 183 | VL-P of I2C | artificial | aa | ELVVTQEPSLTVSPGGTVTLTCGSSTGAVTSGNYPNWVQQKPGQAPRGLIGGTKFLAPGTPARFS |
| | | | | GSLLGGKAALTLSGVQPEDEAEYYCVLWYSNRWVFGGGTKLTVL |
| 184 | VL-P of I2C | artificial | nt | GAGCTCGTTGTGACTCAGGAACCTTCACTCACCGTATCACCTGGTGGAACAGTCACACTCACTTG |
| | | | | TGGCTCCTCGACTGGGGCTGTTACATCTGGCAACTACCCAAACTGGGTCCAACAAAAACCAGGTC |
| | | | | AGGCACCCCGTGGTCTAATAGGTGGGACTAAGTTCCTCGCCCCCGGTACTCCTGCCAGATTCTCA |
| | | | | GGCTCCCTGCTTGGAGGCAAGGCTGCCCTCACCCTCTCAGGGGTACAGCCAGAGGATGAGGCAGA |
| | | | | ATATTACTGTGTTCTATGGTACAGCAACCGCTGGGTGTTCGGTGGAGGAACCAAACTGACTGTCC |
| | | | | TA |
| 185 | VH-VL of I2C | artificial | aa | EVQLVESGGGLVQPGGSLKLSCAASGFTFNKYAMNWVRQAPGKGLEWVARIRSKYNNYATYYADS |
| | | | | VKDRFTISRDDSKNTAYLQMNNLKTEDTAVYYCVRHGNFGNSYISYWAYWGQGTLVTVSSGGGGS |
| | | | | GGGGSGGGGSQTVVTQEPSLTVSPGGTVTLTCGSSTGAVTSGNYPNWVQQKPGQAPRGLIGGTKF |
| | | | | LAPGTPARFSGSLLGGKAALTLSGVQPEDEAEYYCVLWYSNRWVFGGGTKLTVL |
| 186 | VH-VL of I2C | artificial | nt | GAGGTGCAGCTGGTCGAGTCTGGAGGAGGATTGGTGCAGCCTGGAGGGTCATTGAAACTCTCATG |
| | | | | TGCAGCCTCTGGATTCACCTTCAATAAGTACGCCATGAACTGGGTCCGCCAGGCTCCAGGAAAGG |
| | | | | GTTTGGAATGGGTTGCTCGCATAAGAAGTAAATATAATAATTATGCAACATATTATGCCGATTCA |
| | | | | GTGAAAGACAGGTTCACCATCTCCAGAGATGATTCAAAAAACACTGCCTATCTACAAATGAACAA |
| | | | | CTTGAAAACTGAGGACACTGCCGTGTACTACTGTGTGAGACATGGGAACTTCGGTAATAGCTACA |
| | | | | TATCCTACTGGGCTTACTGGGGCCAAGGGACTCTGGTCACCGTCTCCTCAGGTGGTGGTGGTTCT |
| | | | | GGCGGCGGCGGCTCCGGTGGTGGTGGTTCTCAGACTGTTGTGACTCAGGAACCTTCACTCACCGT |
| | | | | ATCACCTGGTGGAACAGTCACACTCACTTGTGGCTCCTCGACTGGGGCTGTTACATCTGGCAACT |
| | | | | ACCCAAACTGGGTCCAACAAAAACCAGGTCAGGCACCCCGTGGTCTAATAGGTGGGACTAAGTTC |
| | | | | CTCGCCCCCGGTACTCCTGCCAGATTCTCAGGCTCCCTGCTTGGAGGCAAGGCTGCCCTCACCCT |
| | | | | CTCAGGGGTACAGCCAGAGGATGAGGCAGAATATTACTGTGTTCTATGGTACAGCAACCGCTGGG |
| | | | | TGTTCGGTGGAGGAACCAAACTGACTGTCCTA |
| 187 | VH-VL-P of I2C | artificial | aa | EVQLLESGGGLVQPGGSLKLSCAASGFTFNKYAMNWVRQAPGKGLEWVARIRSKYNNYATYYADS |
| | | | | VKDRFTISRDDSKNTAYLQMNNLKTEDTAVYYCVRHGNFGNSYISYWAYWGQGTLVTVSSGGGGS |
| | | | | GGGGSGGGGSELVVTQEPSLTVSPGGTVTLTCGSSTGAVTSGNYPNWVQQKPGQAPRGLIGGTKF |
| | | | | LAPGTPARFSGSLLGGKAALTLSGVQPEDEAEYYCVLWYSNRWVFGGGTKLTVL |
| 188 | VH-VL-P of I2C | artificial | nt | GAGGTGCAGCTGCTCGAGTCTGGAGGAGGATTGGTGCAGCCTGGAGGGTCATTGAAACTCTCATG |
| | | | | TGCAGCCTCTGGATTCACCTTCAATAAGTACGCCATGAACTGGGTCCGCCAGGCTCCAGGAAAGG |
| | | | | GTTTGGAATGGGTTGCTCGCATAAGAAGTAAATATAATAATTATGCAACATATTATGCCGATTCA |
| | | | | GTGAAAGACAGGTTCACCATCTCCAGAGATGATTCAAAAAACACTGCCTATCTACAAATGAACAA |
| | | | | CTTGAAAACTGAGGACACTGCCGTGTACTACTGTGTGAGACATGGGAACTTCGGTAATAGCTACA |
| | | | | TATCCTACTGGGCTTACTGGGGCCAAGGGACTCTGGTCACCGTCTCCTCAGGTGGTGGTGGTTCT |
| | | | | GGCGGCGGCGGCTCCGGTGGTGGTGGTTCTGAGCTCGTTGTGACTCAGGAACCTTCACTCACCGT |
| | | | | ATCACCTGGTGGAACAGTCACACTCACTTGTGGCTCCTCGACTGGGGCTGTTACATCTGGCAACT |
| | | | | ACCCAAACTGGGTCCAACAAAAACCAGGTCAGGCACCCCGTGGTCTAATAGGTGGGACTAAGTTC |
| | | | | CTCGCCCCCGGTACTCCTGCCAGATTCTCAGGCTCCCTGCTTGGAGGCAAGGCTGCCCTCACCCT |
| | | | | CTCAGGGGTACAGCCAGAGGATGAGGCAGAATATTACTGTGTTCTATGGTACAGCAACCGCTGGG |
| | | | | TGTTCGGTGGAGGAACCAAACTGACTGTCCTA |
| 189 | CDR-L1 of EGF- | artificial | aa | RASQSVSSSTYSYIH |
| | R 21-63 | | | |
| 190 | CDR-L2 of EGF- | artificial | aa | YASNLES |
| | R 21-63 | | | |
| 191 | CDR-L3 of EGF- | artificial | aa | QHSWEIPFT |
| | R 21-63 | | | |
| 192 | CDR-H1 of EGF- | artificial | aa | DCVII |
| | R 21-63 | | | |
| 193 | CDR-H2 of EGF- | artificial | aa | QIYPGTGRSYYNEIFKG |
| | R 21-63 | | | |
| 194 | CDR-H3 of EGF- | artificial | aa | STLIHGTWFSY |
| | R 21-63 | | | |
| 195 | VH of EGF-R 21- | artificial | aa | QVQLQQSGPDLVKPGASVKMSCKASGHTFTDCVIIWVKQRAGQGLEWIGQIYPGTGRSYYNEIFK |
| | 63 | | | GKATLTADKSSNTVHIQLSSLTSEDSAVYFCALSTLIHGTWFSYWGQGTLVTVSS |
| 196 | VH of EGF-R 21- | artificial | nt | CAGGTTCAGCTGCAGCAGTCTGGACCTGATCTGGTGAAGCCTGGGGCCTCAGTGAAGATGTCCTG |
| | 63 | | | CAAGGCTTCTGGACACACTTTCACTGACTGTGTTATAATCTGGGTGAAACAGAGAGCTGGACAGG |
| | | | | GCCTTGAGTGGATTGGACAGATTTATCCAGGGACTGGTCGTTCTTACTACAATGAGATTTTCAAG |
| | | | | GGCAAGGCCACACTGACTGCAGACAAATCCTCCAACACAGTCCACATTCAACTCAGCAGCCTGAC |
| | | | | ATCTGAGGACTCTGCGGTCTATTTCTGTGCCCTATCTACTCTTATTCACGGGACCTGGTTTTCTT |
| | | | | ATTGGGGCCAAGGGACTCTGGTCACTGTCTCTTCC |
| 197 | VL of EGF-R 21- | artificial | aa | DIVLTQSPASLPVSLGQRATISCRASQSVSSSTYSYIHWYQQKPGQPPKLLITYASNLESGVPAR |
| | 63 | | | FSGSGSGTDFTLDIHPVEEDDSSTYYCQHSWEIPFTFGSGTKLEIK |
| 198 | VL of EGF-R 21- | artificial | nt | GACATTGTGCTGACACAGTCTCCTGCTTCCTTACCTGTGTCTCTGGGGCAGAGGGCCACCATCTC |
| | 63 | | | ATGCAGGGCCAGCCAAAGTGTCAGTTCATCTACTTATAGTTATATACACTGGTACCAACAGAAAC |
| | | | | CAGGACAGCCACCCAAACTCCTCATCACGTATGCATCCAACCTAGAATCTGGGGTCCCTGCCAGG |
| | | | | TTCAGTGGCAGTGGGTCTGGGACAGACTTCACCCTCGACATCCATCCTGTGGAGGAGGATGATTC |
| | | | | TTCAACATATTACTGTCAGCACAGTTGGGAGATTCCATTTACGTTCGGCTCGGGGACAAAGTTGG |
| | | | | AAATAAAA |
| 199 | VL-VH of EGF-R | artificial | aa | DIVLTQSPASLPVSLGQRATISCRASQSVSSSTYSYIHWYQQKPGQPPKLLITYASNLESGVPAR |
| | 21-63 | | | FSGSGSGTDFTLDIHPVEEDDSSTYYCQHSWEIPFTFGSGTKLEIKGGGGSGGGGSGGGGSQVQL |
| | | | | QQSGPDLVKPGASVKMSCKASGHTFTDCVIIWVKQRAGQGLEWIGQIYPGTGRSYYNEIFKGKAT |
| | | | | LTADKSSNTVHIQLSSLTSEDSAVYFCALSTLIHGTWFSYWGQGTLVTVSS |
| 200 | VL-VH of EGF-R | artificial | nt | GACATTGTGCTGACACAGTCTCCTGCTTCCTTACCTGTGTCTCTGGGGCAGAGGGCCACCATCTC |
| | 21-63 | | | ATGCAGGGCCAGCCAAAGTGTCAGTTCATCTACTTATAGTTATATACACTGGTACCAACAGAAAC |
| | | | | CAGGACAGCCACCCAAACTCCTCATCACGTATGCATCCAACCTAGAATCTGGGGTCCCTGCCAGG |
| | | | | TTCAGTGGCAGTGGGTCTGGGACAGACTTCACCCTCGACATCCATCCTGTGGAGGAGGATGATTC |
| | | | | TTCAACATATTACTGTCAGCACAGTTGGGAGATTCCATTTACGTTCGGCTCGGGGACAAAGTTGG |
| | | | | AAATAAAAGGTGGTGGTGGTTCTGGCGGCGGCGGCTCCGGTGGTGGTGGTTCTCAGGTTCAGCTG |
| | | | | CAGCAGTCTGGACCTGATCTGGTGAAGCCTGGGGCCTCAGTGAAGATGTCCTGCAAGGCTTCTGG |
| | | | | ACACACTTTCACTGACTGTGTTATAATCTGGGTGAAACAGAGAGCTGGACAGGGCCTTGAGTGGA |
| | | | | TTGGACAGATTTATCCAGGGACTGGTCGTTCTTACTACAATGAGATTTTCAAGGGCAAGGCCACA |
| | | | | CTGACTGCAGACAAATCCTCCAACACAGTCCACATTCAACTCAGCAGCCTGACATCTGAGGACTC |
| | | | | TGCGGTCTATTTCTGTGCCCTATCTACTCTTATTCACGGGACCTGGTTTTCTTATTGGGGCCAAG |
| | | | | GGACTCTGGTCACTGTCTCTTCC |
| 201 | CDR-L1 of | artificial | aa | KSSQSVLNSSNNRNYLA |
| | MCSP-G4 | | | |
| 202 | CDR-L2 of | artificial | aa | WASTRES |
| | MCSP-G4 | | | |
| 203 | CDR-L3 of | artificial | aa | QQHYSTPFT |
| | MCSP-G4 | | | |
| 204 | CDR-H1 of | artificial | aa | NYYIH |
| | MCSP-G4 | | | |
| 205 | CDR-H2 of | artificial | aa | WINPNSGATNYAQKFQG |
| | MCSP-G4 | | | |
| 206 | CDR-H3 of | artificial | aa | SWVSWFAS |
| | MCSP-G4 | | | |
| 207 | VH of MCSP-G4 | artificial | aa | QVQLVQSGAEVKRPGASMKVSCKASGYTFTNYYIHWVRQAPGQGLEWMGWINPNSGATNYAQKFQ |
| | | | | GRVTMTRDTSTSTVYMELSSLRSEDTAVYYCAKSWVSWFASWGQGTLVTVSS |
| 208 | VH of MCSP-G4 | artificial | nt | CAGGTGCAGCTGGTCCAGTCTGGGGCTGAGGTGAAGAGGCCTGGGGCCTCAATGAAGGTCTCCTG |
| | | | | CAAGGCTTCTGGGTACACCTTCACCAACTACTATATACACTGGGTGCGACAGGCCCCTGGACAAG |
| | | | | GTCTTGAGTGGATGGGTTGGATCAACCCTAACAGTGGTGCCACAAACTATGCACAGAAGTTCCAG |
| | | | | GGCAGAGTCACCATGACCAGGGACACGTCCACGAGCACAGTCTACATGGAGCTGAGCAGCCTGAG |
| | | | | ATCTGAGGACACGGCCGTGTATTACTGTGCGAAATCCTGGGTCTCCTGGTTTGCTTCCTGGGGTC |
| | | | | AAGGAACCTTGGTCACCGTCTCCTCA |
| 209 | VL of MCSP-G4 | artificial | aa | DIVMTQSPDSLAVSLGERATINCKSSQSVLNSSNNRNYLAWYQQKPGQPPKLLIYWASTRESGVP |
| | | | | DRFSGSGSGTDFTLTISGLQAEDVAVYYCQQHYSTPFTFGPGTKVDIK |
| 210 | VL of MCSP-G4 | artificial | nt | GATATCGTGATGACCCAGTCTCCAGACTCCCTGGCTGTGTCTCTGGGCGAGAGGGCCACCATCAA |
| | | | | CTGCAAGTCCAGCCAGAGTGTTTTAAACAGCTCCAACAATAGGAACTACTTAGCTTGGTACCAGC |
| | | | | AGAAACCAGGACAGCCTCCTAAGCTGCTCATTTACTGGGCATCTACCCGGGAATCCGGGGTCCCT |
| | | | | GACCGATTCAGTGGCAGCGGGTCTGGGACAGATTTCACTCTCACCATCAGTGGCCTGCAGGCTGA |
| | | | | AGATGTGGCAGTTTATTACTGTCAGCAACATTATAGTACTCCATTCACTTTTGGCCCTGGGACCA |
| | | | | AAGTGGATATCAAA |
| 211 | VH-P of | artificial | aa | EVQLLESGAEVKRPGASMKVSCKASGYTFTNYYIHWVRQAPGQGLEWMGWINPNSGATNYAQKFQ |
| | MCSP-G4 | | | GRVTMTRDTSTSTVYMELSSLRSEDTAVYYCAKSWVSWFASWGQGTLVTVSS |
| 212 | VH-P of | artificial | nt | GAGGTGCAGCTGCTCGAGTCTGGGGCTGAGGTGAAGAGGCCTGGGGCCTCAATGAAGGTCTCCTG |
| | MCSP-G4 | | | CAAGGCTTCTGGGTACACCTTCACCAACTACTATATACACTGGGTGCGACAGGCCCCTGGACAAG |
| | | | | GTCTTGAGTGGATGGGTTGGATCAACCCTAACAGTGGTGCCACAAACTATGCACAGAAGTTCCAG |
| | | | | GGCAGAGTCACCATGACCAGGGACACGTCCACGAGCACAGTCTACATGGAGCTGAGCAGCCTGAG |
| | | | | ATCTGAGGACACGGCCGTGTATTACTGTGCGAAATCCTGGGTCTCCTGGTTTGCTTCCTGGGGTC |
| | | | | AAGGAACCTTGGTCACCGTCTCCTCA |
| 213 | VL-P of | artificial | aa | ELVMTQSPDSLAVSLGERATINCKSSQSVLNSSNNRNYLAWYQQKPGQPPKLLIYWASTRESGVP |
| | MCSP-G4 | | | DRFSGSGSGTDFTLTISGLQAEDVAVYYCQQHYSTPFTFGPGTKVDIK |
| 214 | VL-P of | artificial | nt | GAGCTCGTGATGACCCAGTCTCCAGACTCCCTGGCTGTGTCTCTGGGCGAGAGGGCCACCATCAA |
| | MCSP-G4 | | | CTGCAAGTCCAGCCAGAGTGTTTTAAACAGCTCCAACAATAGGAACTACTTAGCTTGGTACCAGC |
| | | | | AGAAACCAGGACAGCCTCCTAAGCTGCTCATTTACTGGGCATCTACCCGGGAATCCGGGGTCCCT |
| | | | | GACCGATTCAGTGGCAGCGGGTCTGGGACAGATTTCACTCTCACCATCAGTGGCCTGCAGGCTGA |
| | | | | AGATGTGGCAGTTTATTACTGTCAGCAACATTATAGTACTCCATTCACTTTTGGCCCTGGGACCA |
| | | | | AAGTGGATATCAAA |
| 215 | VH-VL of MCSP- | artificial | aa | QVQLVQSGAEVKRPGASMKVSCKASGYTFTNYYIHWVRQAPGQGLEWMGWINPNSGATNYAQKFQ |
| | G4 | | | GRVTMTRDTSTSTVYMELSSLRSEDTAVYYCAKSWVSWFASWGQGTLVTVSSGGGGSGGGGSGGG |
| | | | | GSDIVMTQSPDSLAVSLGERATINCKSSQSVLNSSNNRNYLAWYQQKPGQPPKLLIYWASTRESG |
| | | | | VPDRFSGSGSGTDFTLTISGLQAEDVAVYYCQQHYSTPFTFGPGTKVDIK |
| 216 | VH-VL of MCSP- | artificial | nt | CAGGTGCAGCTGGTCCAGTCTGGGGCTGAGGTGAAGAGGCCTGGGGCCTCAATGAAGGTCTCCTG |
| | G4 | | | CAAGGCTTCTGGGTACACCTTCACCAACTACTATATACACTGGGTGCGACAGGCCCCTGGACAAG |
| | | | | GTCTTGAGTGGATGGGTTGGATCAACCCTAACAGTGGTGCCACAAACTATGCACAGAAGTTCCAG |
| | | | | GGCAGAGTCACCATGACCAGGGACACGTCCACGAGCACAGTCTACATGGAGCTGAGCAGCCTGAG |
| | | | | ATCTGAGGACACGGCCGTGTATTACTGTGCGAAATCCTGGGTCTCCTGGTTTGCTTCCTGGGGTC |
| | | | | AAGGAACCTTGGTCACCGTCTCCTCAGGTGGTGGTGGTTCTGGCGGCGGCGGCTCCGGTGGTGGT |
| | | | | GGTTCTGATATCGTGATGACCCAGTCTCCAGACTCCCTGGCTGTGTCTCTGGGCGAGAGGGCCAC |
| | | | | CATCAACTGCAAGTCCAGCCAGAGTGTTTTAAACAGCTCCAACAATAGGAACTACTTAGCTTGGT |
| | | | | ACCAGCAGAAACCAGGACAGCCTCCTAAGCTGCTCATTTACTGGGCATCTACCCGGGAATCCGGG |
| | | | | GTCCCTGACCGATTCAGTGGCAGCGGGTCTGGGACAGATTTCACTCTCACCATCAGTGGCCTGCA |
| | | | | GGCTGAAGATGTGGCAGTTTATTACTGTCAGCAACATTATAGTACTCCATTCACTTTTGGCCCTG |
| | | | | GGACCAAAGTGGATATCAAA |
| 217 | VH-VL-P of | artificial | aa | EVQLLESGAEVKRPGASMKVSCKASGYTFTNYYIHWVRQAPGQGLEWMGWINPNSGATNYAQKFQ |
| | MCSP-G4 | | | GRVTMTRDTSTSTVYMELSSLRSEDTAVYYCAKSWVSWFASWGQGTLVTVSSGGGGSGGGGSGGG |
| | | | | GSELVMTQSPDSLAVSLGERATINCKSSQSVLNSSNNRNYLAWYQQKPGQPPKLLIYWASTRESG |
| | | | | VPDRFSGSGSGTDFTLTISGLQAEDVAVYYCQQHYSTPFTFGPGTKVDIK |
| 218 | VH-VL-P of | artificial | nt | GAGGTGCAGCTGCTCGAGTCTGGGGCTGAGGTGAAGAGGCCTGGGGCCTCAATGAAGGTCTCCTG |
| | MCSP-G4 | | | CAAGGCTTCTGGGTACACCTTCACCAACTACTATATACACTGGGTGCGACAGGCCCCTGGACAAG |
| | | | | GTCTTGAGTGGATGGGTTGGATCAACCCTAACAGTGGTGCCACAAACTATGCACAGAAGTTCCAG |
| | | | | GGCAGAGTCACCATGACCAGGGACACGTCCACGAGCACAGTCTACATGGAGCTGAGCAGCCTGAG |
| | | | | ATCTGAGGACACGGCCGTGTATTACTGTGCGAAATCCTGGGTCTCCTGGTTTGCTTCCTGGGGTC |
| | | | | AAGGAACCTTGGTCACCGTCTCCTCAGGTGGTGGTGGTTCTGGCGGCGGCGGCTCCGGTGGTGGT |
| | | | | GGTTCTGAGCTCGTGATGACCCAGTCTCCAGACTCCCTGGCTGTGTCTCTGGGCGAGAGGGCCAC |
| | | | | CATCAACTGCAAGTCCAGCCAGAGTGTTTTAAACAGCTCCAACAATAGGAACTACTTAGCTTGGT |
| | | | | ACCAGCAGAAACCAGGACAGCCTCCTAAGCTGCTCATTTACTGGGCATCTACCCGGGAATCCGGG |
| | | | | GTCCCTGACCGATTCAGTGGCAGCGGGTCTGGGACAGATTTCACTCTCACCATCAGTGGCCTGCA |
| | | | | GGCTGAAGATGTGGCAGTTTATTACTGTCAGCAACATTATAGTACTCCATTCACTTTTGGCCCTG |
| | | | | GGACCAAAGTGGATATCAAA |
| 219 | CDR-L1 of | artificial | aa | KSSQSVLNSSNNRNYLA |
| | MCSP-D2 | | | |
| 220 | CDR-L2 of | artificial | aa | WASTRES |
| | MCSP-D2 | | | |
| 221 | CDR-L3 of | artificial | aa | QQHYSTPFT |
| | MCSP-D2 | | | |
| 222 | CDR-H1 of | artificial | aa | GYYMH |
| | MCSP-D2 | | | |
| 223 | CDR-H2 of | artificial | aa | WINPNSGGTSYAQKFQG |
| | MCSP-D2 | | | |
| 224 | CDR-H3 of | artificial | aa | SWVSWFAS |
| | MCSP-D2 | | | |
| 225 | VH of MCSP-D2 | artificial | aa | QVQLVQSGAEVKKPGASVKVSCKASGYTFTGYYMHWVRQAPGQGLEWMGWINPNSGGTSYAQKFQ |
| | | | | GRVTMTRDTSTSTVYMELSNLRSDDTAVYYCAKSWVSWFASWGQGTLVTVSS |
| 226 | VH of MCSP-D2 | artificial | nt | CAGGTGCAGCTGGTCCAGTCTGGGGCTGAGGTGAAGAAGCCTGGGGCCTCAGTGAAGGTCTCCTG |
| | | | | CAAGGCTTCTGGATACACCTTCACCGGCTACTATATGCACTGGGTGCGACAGGCCCCTGGACAAG |
| | | | | GGCTTGAGTGGATGGGATGGATCAACCCTAACAGTGGTGGCACAAGCTACGCACAGAAGTTCCAG |
| | | | | GGCAGAGTCACCATGACTAGGGACACGTCCACGAGCACAGTCTACATGGAGCTGAGCAACCTGAG |
| | | | | ATCTGACGACACGGCCGTGTATTACTGTGCGAAATCCTGGGTCTCCTGGTTTGCTTCCTGGGGTC |
| | | | | AAGGAACCTTGGTCACCGTCTCCTCA |
| 227 | VL of MCSP-D2 | artificial | aa | DIVMTQSPDSLAVSLGERATINCKSSQSVLNSSNNRNYLAWYQQKPGQPPKLLIYWASTRESGVP |
| | | | | DRFSGSGSGTDFTLTISGLQAEDVAVYYCQQHYSTPFTFGPGTKVDIK |
| 228 | VL of MCSP-D2 | artificial | nt | GATATCGTGATGACCCAGTCTCCAGACTCCCTGGCTGTGTCTCTGGGCGAGAGGGCCACCATCAA |
| | | | | CTGCAAGTCCAGCCAGAGTGTTTTAAACAGCTCCAACAATAGGAACTACTTAGCTTGGTACCAGC |
| | | | | AGAAACCAGGACAGCCTCCTAAGCTGCTCATTTACTGGGCATCTACCCGGGAATCCGGGGTCCCT |
| | | | | GACCGATTCAGTGGCAGCGGGTCTGGGACAGATTTCACTCTCACCATCAGTGGCCTGCAGGCTGA |
| | | | | AGATGTGGCAGTTTATTACTGTCAGCAACATTATAGTACTCCATTCACTTTTGGCCCTGGGACCA |
| | | | | AAGTGGATATCAAA |
| 229 | VH-P of | artificial | aa | EVQLLESGAEVKKPGASVKVSCKASGYTFTGYYMHWVRQAPGQGLEWMGWINPNSGGTSYAQKFQ |
| | MCSP-D2 | | | GRVTMTRDTSTSTVYMELSNLRSDDTAVYYCAKSWVSWFASWGQGTLVTVSS |
| 230 | VH-P of | artificial | nt | GAGGTGCAGCTGCTCGAGTCTGGGGCTGAGGTGAAGAAGCCTGGGGCCTCAGTGAAGGTCTCCTG |
| | MCSP-D2 | | | CAAGGCTTCTGGATACACCTTCACCGGCTACTATATGCACTGGGTGCGACAGGCCCCTGGACAAG |
| | | | | GGCTTGAGTGGATGGGATGGATCAACCCTAACAGTGGTGGCACAAGCTACGCACAGAAGTTCCAG |
| | | | | GGCAGAGTCACCATGACTAGGGACACGTCCACGAGCACAGTCTACATGGAGCTGAGCAACCTGAG |
| | | | | ATCTGACGACACGGCCGTGTATTACTGTGCGAAATCCTGGGTCTCCTGGTTTGCTTCCTGGGGTC |
| | | | | AAGGAACCTTGGTCACCGTCTCCTCA |
| 231 | VL-P of | artificial | aa | ELVMTQSPDSLAVSLGERATINCKSSQSVLNSSNNRNYLAWYQQKPGQPPKLLIYWASTRESGVP |
| | MCSP-D2 | | | DRFSGSGSGTDFTLTISGLQAEDVAVYYCQQHYSTPFTFGPGTKVDIK |
| 232 | VL-P of | artificial | nt | GAGCTCGTGATGACCCAGTCTCCAGACTCCCTGGCTGTGTCTCTGGGCGAGAGGGCCACCATCAA |
| | MCSP-D2 | | | CTGCAAGTCCAGCCAGAGTGTTTTAAACAGCTCCAACAATAGGAACTACTTAGCTTGGTACCAGC |
| | | | | AGAAACCAGGACAGCCTCCTAAGCTGCTCATTTACTGGGCATCTACCCGGGAATCCGGGGTCCCT |
| | | | | GACCGATTCAGTGGCAGCGGGTCTGGGACAGATTTCACTCTCACCATCAGTGGCCTGCAGGCTGA |
| | | | | AGATGTGGCAGTTTATTACTGTCAGCAACATTATAGTACTCCATTCACTTTTGGCCCTGGGACCA |
| | | | | AAGTGGATATCAAA |
| 233 | VH-VL of MCSP- | artificial | aa | QVQLVQSGAEVKKPGASVKVSCKASGYTFTGYYMHWVRQAPGQGLEWMGWINPNSGGTSYAQKFQ |
| | D2 | | | GRVTMTRDTSTSTVYMELSNLRSDDTAVYYCAKSWVSWFASWGQGTLVTVSSGGGGSGGGGSGGG |
| | | | | GSDIVMTQSPDSLAVSLGERATINCKSSQSVLNSSNNRNYLAWYQQKPGQPPKLLIYWASTRESG |
| | | | | VPDRFSGSGSGTDFTLTISGLQAEDVAVYYCQQHYSTPFTFGPGTKVDIK |
| 234 | VH-VL of MCSP- | artificial | nt | CAGGTGCAGCTGGTCCAGTCTGGGGCTGAGGTGAAGAAGCCTGGGGCCTCAGTGAAGGTCTCCTG |
| | D2 | | | CAAGGCTTCTGGATACACCTTCACCGGCTACTATATGCACTGGGTGCGACAGGCCCCTGGACAAG |
| | | | | GGCTTGAGTGGATGGGATGGATCAACCCTAACAGTGGTGGCACAAGCTACGCACAGAAGTTCCAG |
| | | | | GGCAGAGTCACCATGACTAGGGACACGTCCACGAGCACAGTCTACATGGAGCTGAGCAACCTGAG |
| | | | | ATCTGACGACACGGCCGTGTATTACTGTGCGAAATCCTGGGTCTCCTGGTTTGCTTCCTGGGGTC |
| | | | | AAGGAACCTTGGTCACCGTCTCCTCAGGTGGTGGTGGTTCTGGCGGCGGCGGCTCCGGTGGTGGT |
| | | | | GGTTCTGATATCGTGATGACCCAGTCTCCAGACTCCCTGGCTGTGTCTCTGGGCGAGAGGGCCAC |
| | | | | CATCAACTGCAAGTCCAGCCAGAGTGTTTTAAACAGCTCCAACAATAGGAACTACTTAGCTTGGT |
| | | | | ACCAGCAGAAACCAGGACAGCCTCCTAAGCTGCTCATTTACTGGGCATCTACCCGGGAATCCGGG |
| | | | | GTCCCTGACCGATTCAGTGGCAGCGGGTCTGGGACAGATTTCACTCTCACCATCAGTGGCCTGCA |
| | | | | GGCTGAAGATGTGGCAGTTTATTACTGTCAGCAACATTATAGTACTCCATTCACTTTTGGCCCTG |
| | | | | GGACCAAAGTGGATATCAAA |
| 235 | VH-VL-P of | artificial | aa | EVQLLESGAEVKKPGASVKVSCKASGYTFTGYYMHWVRQAPGQGLEWMGWINPNSGGTSYAQKFQ |
| | MCSP-D2 | | | GRVTMTRDTSTSTVYMELSNLRSDDTAVYYCAKSWVSWFASWGQGTLVTVSSGGGGSGGGGSGGG |
| | | | | GSELVMTQSPDSLAVSLGERATINCKSSQSVLNSSNNRNYLAWYQQKPGQPPKLLIYWASTRESG |
| | | | | VPDRFSGSGSGTDFTLTISGLQAEDVAVYYCQQHYSTPFTFGPGTKVDIK |
| 236 | VH-VL-P of | artificial | nt | GAGGTGCAGCTGCTCGAGTCTGGGGCTGAGGTGAAGAAGCCTGGGGCCTCAGTGAAGGTCTCCTG |
| | MCSP-D2 | | | CAAGGCTTCTGGATACACCTTCACCGGCTACTATATGCACTGGGTGCGACAGGCCCCTGGACAAG |
| | | | | GGCTTGAGTGGATGGGATGGATCAACCCTAACAGTGGTGGCACAAGCTACGCACAGAAGTTCCAG |
| | | | | GGCAGAGTCACCATGACTAGGGACACGTCCACGAGCACAGTCTACATGGAGCTGAGCAACCTGAG |
| | | | | ATCTGACGACACGGCCGTGTATTACTGTGCGAAATCCTGGGTCTCCTGGTTTGCTTCCTGGGGTC |
| | | | | AAGGAACCTTGGTCACCGTCTCCTCAGGTGGTGGTGGTTCTGGCGGCGGCGGCTCCGGTGGTGGT |
| | | | | GGTTCTGAGCTCGTGATGACCCAGTCTCCAGACTCCCTGGCTGTGTCTCTGGGCGAGAGGGCCAC |
| | | | | CATCAACTGCAAGTCCAGCCAGAGTGTTTTAAACAGCTCCAACAATAGGAACTACTTAGCTTGGT |
| | | | | ACCAGCAGAAACCAGGACAGCCTCCTAAGCTGCTCATTTACTGGGCATCTACCCGGGAATCCGGG |
| | | | | GTCCCTGACCGATTCAGTGGCAGCGGGTCTGGGACAGATTTCACTCTCACCATCAGTGGCCTGCA |
| | | | | GGCTGAAGATGTGGCAGTTTATTACTGTCAGCAACATTATAGTACTCCATTCACTTTTGGCCCTG |
| | | | | GGACCAAAGTGGATATCAAA |
| 237 | CDR-L1 of | artificial | aa | KSSQSVLSSSNNKNYLN |
| | MCSP-F9 | | | |
| 238 | CDR-L2 of | artificial | aa | WASTRES |
| | MCSP-F9 | | | |
| 239 | CDR-L3 of | artificial | aa | QQHYSVPFT |
| | MCSP-F9 | | | |
| 240 | CDR-H1 of | artificial | aa | SSNWWS |
| | MCSP-F9 | | | |
| 241 | CDR-H2 of | artificial | aa | TIYYNGNTYYNPSLKS |
| | MCSP-F9 | | | |
| 242 | CDR-H3 of | artificial | aa | SWVSWFAS |
| | MCSP-F9 | | | |
| 243 | VH of MCSP-F9 | artificial | aa | QVQLQESGPGLVKPSETLSLTCVVSGGSISSSNWWSWVRQPPGKGLEWLGTIYYNGNTYYNPSLK |
| | | | | SRVTISVDTSKNQFSLRLSSVTAADTAVYYCAKSWVSWFASWGQGTLVTVSS |
| 244 | VH of MCSP-F9 | artificial | nt | CAGGTGCAGCTGCAAGAGTCTGGCCCAGGACTGGTGAAGCCTTCGGAGACCCTGTCCCTCACCTG |
| | | | | CGTTGTCTCTGGTGGCTCCATCAGCAGTAGTAACTGGTGGAGCTGGGTCCGCCAGCCCCCAGGGA |
| | | | | AGGGACTGGAGTGGCTTGGGACTATCTATTATAATGGGAATACCTACTACAACCCGTCCCTCAAG |
| | | | | AGTCGAGTCACCATCTCCGTAGACACGTCCAAGAACCAGTTCTCCCTGAGGCTGAGCTCTGTGAC |
| | | | | CGCCGCAGACACGGCCGTGTATTACTGTGCGAAATCCTGGGTCTCCTGGTTTGCTTCCTGGGGTC |
| | | | | AAGGAACCTTGGTCACCGTCTCCTCA |
| 245 | VL of MCSP-F9 | artificial | aa | DIVMTQSPDSLAVSLGERATINCKSSQSVLSSSNNKNYLNWYQQKPGQPPKLLIYWASTRESGVP |
| | | | | DRFSGSGSGTDFTLTISSLQAEDVAVYYCQQHYSVPFTFGPGTKVDIK |
| 246 | VL of MCSP-F9 | artificial | nt | GATATCGTGATGACACAGTCTCCAGACTCCCTGGCTGTGTCTCTGGGCGAGAGGGCCACCATCAA |
| | | | | CTGCAAGTCCAGCCAGAGTGTCTTATCCAGCTCCAACAATAAGAACTACTTAAATTGGTACCAGC |
| | | | | AGAAACCAGGACAGCCTCCTAAGTTGCTCATTTACTGGGCATCTACCCGGGAATCCGGGGTCCCT |
| | | | | GACCGATTCAGTGGCAGCGGGTCTGGGACAGATTTCACTCTCACCATCAGCAGCCTGCAGGCTGA |
| | | | | AGATGTGGCAGTTTATTACTGTCAGCAACATTATAGTGTTCCATTCACTTTCGGCCCTGGGACCA |
| | | | | AAGTGGATATCAAA |
| 247 | VH-P of | artificial | aa | EVQLLESGPGLVKPSETLSLTCVVSGGSISSSNWWSWVRQPPGKGLEWLGTIYYNGNTYYNPSLK |
| | MCSP-F9 | | | SRVTISVDTSKNQFSLRLSSVTAADTAVYYCAKSWVSWFASWGQGTLVTVSS |
| 248 | VH-P of | artificial | nt | GAGGTGCAGCTGCTCGAGTCTGGCCCAGGACTGGTGAAGCCTTCGGAGACCCTGTCCCTCACCTG |
| | MCSP-F9 | | | CGTTGTCTCTGGTGGCTCCATCAGCAGTAGTAACTGGTGGAGCTGGGTCCGCCAGCCCCCAGGGA |
| | | | | AGGGACTGGAGTGGCTTGGGACTATCTATTATAATGGGAATACCTACTACAACCCGTCCCTCAAG |
| | | | | AGTCGAGTCACCATCTCCGTAGACACGTCCAAGAACCAGTTCTCCCTGAGGCTGAGCTCTGTGAC |
| | | | | CGCCGCAGACACGGCCGTGTATTACTGTGCGAAATCCTGGGTCTCCTGGTTTGCTTCCTGGGGTC |
| | | | | AAGGAACCTTGGTCACCGTCTCCTCA |
| 249 | VL-P of | artificial | aa | ELVMTQSPDSLAVSLGERATINCKSSQSVLSSSNNKNYLNWYQQKPGQPPKLLIYWASTRESGVP |
| | MCSP-F9 | | | DRFSGSGSGTDFTLTISSLQAEDVAVYYCQQHYSVPFTFGPGTKVDIK |
| 250 | VL-P of | artificial | nt | GAGCTCGTGATGACACAGTCTCCAGACTCCCTGGCTGTGTCTCTGGGCGAGAGGGCCACCATCAA |
| | MCSP-F9 | | | CTGCAAGTCCAGCCAGAGTGTCTTATCCAGCTCCAACAATAAGAACTACTTAAATTGGTACCAGC |
| | | | | AGAAACCAGGACAGCCTCCTAAGTTGCTCATTTACTGGGCATCTACCCGGGAATCCGGGGTCCCT |
| | | | | GACCGATTCAGTGGCAGCGGGTCTGGGACAGATTTCACTCTCACCATCAGCAGCCTGCAGGCTGA |
| | | | | AGATGTGGCAGTTTATTACTGTCAGCAACATTATAGTGTTCCATTCACTTTCGGCCCTGGGACCA |
| | | | | AAGTGGATATCAAA |
| 251 | VH-VL of MCSP- | artificial | aa | QVQLQESGPGLVKPSETLSLTCVVSGGSISSSNWWSWVRQPPGKGLEWLGTIYYNGNTYYNPSLK |
| | F9 | | | SRVTISVDTSKNQFSLRLSSVTAADTAVYYCAKSWVSWFASWGQGTLVTVSSGGGGSGGGGSGGG |
| | | | | GSDIVMTQSPDSLAVSLGERATINCKSSQSVLSSSNNKNYLNWYQQKPGQPPKLLIYWASTRESG |
| | | | | VPDRFSGSGSGTDFTLTISSLQAEDVAVYYCQQHYSVPFTFGPGTKVDIK |
| 252 | VH-VL of MCSP- | artificial | nt | CAGGTGCAGCTGCAAGAGTCTGGCCCAGGACTGGTGAAGCCTTCGGAGACCCTGTCCCTCACCTG |
| | F9 | | | CGTTGTCTCTGGTGGCTCCATCAGCAGTAGTAACTGGTGGAGCTGGGTCCGCCAGCCCCCAGGGA |
| | | | | AGGGACTGGAGTGGCTTGGGACTATCTATTATAATGGGAATACCTACTACAACCCGTCCCTCAAG |
| | | | | AGTCGAGTCACCATCTCCGTAGACACGTCCAAGAACCAGTTCTCCCTGAGGCTGAGCTCTGTGAC |
| | | | | CGCCGCAGACACGGCCGTGTATTACTGTGCGAAATCCTGGGTCTCCTGGTTTGCTTCCTGGGGTC |
| | | | | AAGGAACCTTGGTCACCGTCTCCTCAGGTGGTGGTGGTTCTGGCGGCGGCGGCTCCGGTGGTGGT |
| | | | | GGTTCTGATATCGTGATGACACAGTCTCCAGACTCCCTGGCTGTGTCTCTGGGCGAGAGGGCCAC |
| | | | | CATCAACTGCAAGTCCAGCCAGAGTGTCTTATCCAGCTCCAACAATAAGAACTACTTAAATTGGT |
| | | | | ACCAGCAGAAACCAGGACAGCCTCCTAAGTTGCTCATTTACTGGGCATCTACCCGGGAATCCGGG |
| | | | | GTCCCTGACCGATTCAGTGGCAGCGGGTCTGGGACAGATTTCACTCTCACCATCAGCAGCCTGCA |
| | | | | GGCTGAAGATGTGGCAGTTTATTACTGTCAGCAACATTATAGTGTTCCATTCACTTTCGGCCCTG |
| | | | | GGACCAAAGTGGATATCAAA |
| 253 | VH-VL-P of | artificial | aa | EVQLLESGPGLVKPSETLSLTCVVSGGSISSSNWWSWVRQPPGKGLEWLGTIYYNGNTYYNPSLK |
| | MCSP-F9 | | | SRVTISVDTSKNQFSLRLSSVTAADTAVYYCAKSWVSWFASWGQGTLVTVSSGGGGSGGGGSGGG |
| | | | | GSELVMTQSPDSLAVSLGERATINCKSSQSVLSSSNNKNYLNWYQQKPGQPPKLLIYWASTRESG |
| | | | | VPDRFSGSGSGTDFTLTISSLQAEDVAVYYCQQHYSVPFTFGPGTKVDIK |
| 254 | VH-VL-P of | artificial | nt | GAGGTGCAGCTGCTCGAGTCTGGCCCAGGACTGGTGAAGCCTTCGGAGACCCTGTCCCTCACCTG |
| | MCSP-F9 | | | CGTTGTCTCTGGTGGCTCCATCAGCAGTAGTAACTGGTGGAGCTGGGTCCGCCAGCCCCCAGGGA |
| | | | | AGGGACTGGAGTGGCTTGGGACTATCTATTATAATGGGAATACCTACTACAACCCGTCCCTCAAG |
| | | | | AGTCGAGTCACCATCTCCGTAGACACGTCCAAGAACCAGTTCTCCCTGAGGCTGAGCTCTGTGAC |
| | | | | CGCCGCAGACACGGCCGTGTATTACTGTGCGAAATCCTGGGTCTCCTGGTTTGCTTCCTGGGGTC |
| | | | | AAGGAACCTTGGTCACCGTCTCCTCAGGTGGTGGTGGTTCTGGCGGCGGCGGCTCCGGTGGTGGT |
| | | | | GGTTCTGAGCTCGTGATGACACAGTCTCCAGACTCCCTGGCTGTGTCTCTGGGCGAGAGGGCCAC |
| | | | | CATCAACTGCAAGTCCAGCCAGAGTGTCTTATCCAGCTCCAACAATAAGAACTACTTAAATTGGT |
| | | | | ACCAGCAGAAACCAGGACAGCCTCCTAAGTTGCTCATTTACTGGGCATCTACCCGGGAATCCGGG |
| | | | | GTCCCTGACCGATTCAGTGGCAGCGGGTCTGGGACAGATTTCACTCTCACCATCAGCAGCCTGCA |
| | | | | GGCTGAAGATGTGGCAGTTTATTACTGTCAGCAACATTATAGTGTTCCATTCACTTTCGGCCCTG |
| | | | | GGACCAAAGTGGATATCAAA |
| 255 | CDR-L1 of IgE- | artificial | aa | RASQSVSSNLA |
| | D4 | | | |
| 256 | CDR-L2 of IgE- | artificial | aa | DASNRAT |
| | D4 | | | |
| 257 | CDR-L3 of IgE- | artificial | aa | QQFGDTLWT |
| | D4 | | | |
| 258 | CDR-H1 of IgE- | artificial | aa | SYAMS |
| | D4 | | | |
| 259 | CDR-H2 of IgE- | artificial | aa | SISSGNIIYYPDNVKG |
| | D4 | | | |
| 260 | CDR-H3 of IgE- | artificial | aa | GRSTYGGFDH |
| | D4 | | | |
| 261 | VH of IgE-D4 | artificial | aa | EVQLLESGGGLVQPGGSLRLSCAASGFTFSSYAMSWVRQAPGKGLEWVASISSGNIIYYPDNVKG |
| | | | | RFTISRDNSKNTLYLQMNSLRAEDTAVYYCTRGRSTYGGFDHWGQGTTVTVSS |
| 262 | VH of IgE-D4 | artificial | nt | GAGGTGCAGCTGCTCGAGTCTGGGGGAGGCCTTGTGCAGCCTGGAGGGTCTCTGAGGCTCTCCTG |
| | | | | TGCAGCCTCTGGATTCACTTTCAGTAGTTATGCCATGTCTTGGGTTCGCCAGGCTCCAGGGAAGG |
| | | | | GGCTGGAGTGGGTCGCTTCCATTAGTAGTGGTAATATCATCTACTATCCAGACAATGTGAAGGGC |
| | | | | CGATTCACCATCTCTAGAGATAATTCCAAGAACACCCTGTACCTGCAAATGAACAGTCTGAGGGC |
| | | | | TGAGGACACGGCCGTGTATTATTGTACTAGAGGCCGCAGTACCTACGGGGGATTTGACCACTGGG |
| | | | | GCCAAGGCACCACAGTCACCGTCTCCTCA |
| 263 | VL of IgE-D4 | artificial | aa | EIVLTQSPATLSVSPGERATLSCRASQSVSSNLAWYQQKPGQAPRLLIYDASNRATGIPARFSGS |
| | | | | GSGTDFTLTISSLEPEDFAVYYCQQFGDTLWTFGQGTKVEIK |
| 264 | VL of IgE-D4 | artificial | nt | GAGATCGTGTTGACACAGTCTCCAGCCACCCTGTCTGTGTCTCCAGGGGAAAGAGCCACCCTCTC |
| | | | | CTGCAGGGCCAGTCAGAGTGTTAGCAGCAACTTAGCCTGGTACCAGCAGAAACCTGGCCAGGCTC |
| | | | | CCAGGCTCCTCATCTATGATGCATCCAACAGGGCCACTGGCATCCCAGCCAGGTTCAGTGGCAGT |
| | | | | GGGTCTGGGACAGACTTCACTCTCACCATCAGCAGCCTAGAGCCTGAAGATTTTGCAGTTTATTA |
| | | | | CTGTCAGCAGTTCGGTGATACACTGTGGACGTTCGGCCAAGGGACCAAGGTGGAGATCAAA |
| 265 | VH-P of | artificial | aa | EVQLLESGGGLVQPGGSLRLSCAASGFTFSSYAMSWVRQAPGKGLEWVASISSGNIIYYPDNVKG |
| | IgE-D4 | | | RFTISRDNSKNTLYLQMNSLRAEDTAVYYCTRGRSTYGGFDHWGQGTTVTVSS |
| 266 | VH-P of | artificial | nt | GAGGTGCAGCTGCTCGAGTCTGGGGGAGGCCTTGTGCAGCCTGGAGGGTCTCTGAGGCTCTCCTG |
| | IgE-D4 | | | TGCAGCCTCTGGATTCACTTTCAGTAGTTATGCCATGTCTTGGGTTCGCCAGGCTCCAGGGAAGG |
| | | | | GGCTGGAGTGGGTCGCTTCCATTAGTAGTGGTAATATCATCTACTATCCAGACAATGTGAAGGGC |
| | | | | CGATTCACCATCTCTAGAGATAATTCCAAGAACACCCTGTACCTGCAAATGAACAGTCTGAGGGC |
| | | | | TGAGGACACGGCCGTGTATTATTGTACTAGAGGCCGCAGTACCTACGGGGGATTTGACCACTGGG |
| | | | | GCCAAGGCACCACAGTCACCGTCTCCTCA |
| 267 | VL-P of | artificial | aa | ELVLTQSPATLSVSPGERATLSCRASQSVSSNLAWYQQKPGQAPRLLIYDASNRATGIPARFSGS |
| | IgE-D4 | | | GSGTDFTLTISSLEPEDFAVYYCQQFGDTLWTFGQGTKVEIK |
| 268 | VL-P of | artificial | nt | GAGCTCGTGTTGACACAGTCTCCAGCCACCCTGTCTGTGTCTCCAGGGGAAAGAGCCACCCTCTC |
| | IgE-D4 | | | CTGCAGGGCCAGTCAGAGTGTTAGCAGCAACTTAGCCTGGTACCAGCAGAAACCTGGCCAGGCTC |
| | | | | CCAGGCTCCTCATCTATGATGCATCCAACAGGGCCACTGGCATCCCAGCCAGGTTCAGTGGCAGT |
| | | | | GGGTCTGGGACAGACTTCACTCTCACCATCAGCAGCCTAGAGCCTGAAGATTTTGCAGTTTATTA |
| | | | | CTGTCAGCAGTTCGGTGATACACTGTGGACGTTCGGCCAAGGGACCAAGGTGGAGATCAAA |
| 269 | VH-VL of IgE-D4 | artificial | aa | EVQLLESGGGLVQPGGSLRLSCAASGFTFSSYAMSWVRQAPGKGLEWVASISSGNIIYYPDNVKG |
| | | | | RFTISRDNSKNTLYLQMNSLRAEDTAVYYCTRGRSTYGGFDHWGQGTTVTVSSGGGGSGGGGSGG |
| | | | | GGSEIVLTQSPATLSVSPGERATLSCRASQSVSSNLAWYQQKPGQAPRLLIYDASNRATGIPARF |
| | | | | SGSGSGTDFTLTISSLEPEDFAVYYCQQFGDTLWTFGQGTKVEIK |
| 270 | VH-VL of IgE-D4 | artificial | nt | GAGGTGCAGCTGCTCGAGTCTGGGGGAGGCCTTGTGCAGCCTGGAGGGTCTCTGAGGCTCTCCTG |
| | | | | TGCAGCCTCTGGATTCACTTTCAGTAGTTATGCCATGTCTTGGGTTCGCCAGGCTCCAGGGAAGG |
| | | | | GGCTGGAGTGGGTCGCTTCCATTAGTAGTGGTAATATCATCTACTATCCAGACAATGTGAAGGGC |
| | | | | CGATTCACCATCTCTAGAGATAATTCCAAGAACACCCTGTACCTGCAAATGAACAGTCTGAGGGC |
| | | | | TGAGGACACGGCCGTGTATTATTGTACTAGAGGCCGCAGTACCTACGGGGGATTTGACCACTGGG |
| | | | | GCCAAGGCACCACAGTCACCGTCTCCTCAGGTGGTGGTGGTTCTGGCGGCGGCGGCTCCGGTGGT |
| | | | | GGTGGTTCTGAGATCGTGTTGACACAGTCTCCAGCCACCCTGTCTGTGTCTCCAGGGGAAAGAGC |
| | | | | CACCCTCTCCTGCAGGGCCAGTCAGAGTGTTAGCAGCAACTTAGCCTGGTACCAGCAGAAACCTG |
| | | | | GCCAGGCTCCCAGGCTCCTCATCTATGATGCATCCAACAGGGCCACTGGCATCCCAGCCAGGTTC |
| | | | | AGTGGCAGTGGGTCTGGGACAGACTTCACTCTCACCATCAGCAGCCTAGAGCCTGAAGATTTTGC |
| | | | | AGTTTATTACTGTCAGCAGTTCGGTGATACACTGTGGACGTTCGGCCAAGGGACCAAGGTGGAGA |
| | | | | TCAAA |
| 271 | VH-VL-P of IgE- | artificial | aa | EVQLLESGGGLVQPGGSLRLSCAASGFTFSSYAMSWVRQAPGKGLEWVASISSGNIIYYPDNVKG |
| | D4 | | | RFTISRDNSKNTLYLQMNSLRAEDTAVYYCTRGRSTYGGFDHWGQGTTVTVSSGGGGSGGGGSGG |
| | | | | GGSELVLTQSPATLSVSPGERATLSCRASQSVSSNLAWYQQKPGQAPRLLIYDASNRATGIPARF |
| | | | | SGSGSGTDFTLTISSLEPEDFAVYYCQQFGDTLWTFGQGTKVEIK |
| 272 | VH-VL-P of IgE- | artificial | nt | GAGGTGCAGCTGCTCGAGTCTGGGGGAGGCCTTGTGCAGCCTGGAGGGTCTCTGAGGCTCTCCTG |
| | D4 | | | TGCAGCCTCTGGATTCACTTTCAGTAGTTATGCCATGTCTTGGGTTCGCCAGGCTCCAGGGAAGG |
| | | | | GGCTGGAGTGGGTCGCTTCCATTAGTAGTGGTAATATCATCTACTATCCAGACAATGTGAAGGGC |
| | | | | CGATTCACCATCTCTAGAGATAATTCCAAGAACACCCTCTACCTGCAAATGAACAGTGTGAGGGC |
| | | | | TGAGGACACGGCCGTGTATTATTGTACTAGAGGCCGCAGTACCTACGGGGGATTTGACCACTGGG |
| | | | | GCCAAGGCACCACAGTCACCGTCTCCTCAGGTGGTGGTGGTTCTGGCGGCGGCGGCTCCGGTGGT |
| | | | | GGTGGTTCTGAGCTCGTGTTGACACAGTCTCCAGCCACCCTGTCTGTGTCTCCAGGGGAAAGAGC |
| | | | | CACCCTCTCCTGCAGGGCCAGTCAGAGTGTTAGCAGCAACTTAGCCTGGTACCAGCAGAAACCTG |
| | | | | GCCAGGCTCCCAGGCTCCTCATCTATGATGCATCCAACAGGGCCACTGGCATCCCAGCCAGGTTC |
| | | | | AGTGGCAGTGGGTCTGGGACAGACTTCACTCTCACCATCAGCAGCCTAGAGCCTGAAGATTTTGC |
| | | | | AGTTTATTACTGTCAGCAGTTCGGTGATACACTGTGGACGTTCGGCCAAGGGACCAAGGTGGAGA |
| | | | | TCAAA |
| 273 | CDR-L1 of IgE- | artificial | aa | WASQGVSNNLA |
| | G9 | | | |
| 274 | CDR-L2 of IgE- | artificial | aa | DAFNRAT |
| | G9 | | | |
| 275 | CDR-L3 of IgE- | artificial | aa | QQFGDSLWT |
| | G9 | | | |
| 276 | CDR-H1 of IgE- | artificial | aa | SYAMS |
| | G9 | | | |
| 277 | CDR-H2 of IgE- | artificial | aa | SISSGNIIYYPDNVKG |
| | G9 | | | |
| 278 | CDR-H3 of IgE- | artificial | aa | GRSTYGGFDH |
| | G9 | | | |
| 279 | VH of IgE-G9 | artificial | aa | EVQLLESGGGLVQPGGSLRLSCAASGFTFSSYAMSWVRQAPGKGLEWVASISSGNIIYYPDNVKG |
| | | | | RFTISRDNSKNTLYLQMNSLRAEDTAVYYCTRGRSTYGGFDHWGQGTTVTVSS |
| 280 | VH of IgE-G9 | artificial | nt | GAGGTGCAGCTGCTCGAGTCTGGGGGAGGCCTTGTGCAGCCTGGAGGGTCTCTGAGGCTCTCCTG |
| | | | | TGCAGCCTCTGGATTCACTTTCAGTAGTTATGCCATGTCTTGGGTTCGCCAGGCTCCAGGGAAGG |
| | | | | GGCTGGAGTGGGTCGCTTCCATTAGTAGTGGTAATATCATCTACTATCCAGACAATGTGAAGGGC |
| | | | | CGATTCACCATCTCTAGAGATAATTCCAAGAACACCCTGTACCTGCAAATGAACAGTCTGAGGGC |
| | | | | TGAGGACACGGCCGTGTATTATTGTACTAGAGGCCGCAGTACCTACGGGGGATTTGACCACTGGG |
| | | | | GCCAAGGCACCACAGTCACCGTCTCCTCA |
| 281 | VL of IgE-G9 | artificial | aa | EIVMTQSPATLSVSPGERVTLSCWASQGVSNNLAWYQQRPGQAPRLLIYDAFNRATGIPARFSGS |
| | | | | GSGTDFTLTISRLEPEDFAVYYCQQFGDSLWTFGQGTKLEIK |
| 282 | VL of IgE-G9 | artificial | nt | GAGATCGTGATGACACAGTCTCCAGCCACCCTGTCTGTGTCTCCAGGGGAAAGAGTCACCCTCTC |
| | | | | CTGCTGGGCCAGTCAGGGTGTGAGCAACAACTTAGCCTGGTACCAGCAGAGACCTGGCCAGGCTC |
| | | | | CCAGGCTCCTCATCTATGATGCATTCAACAGGGCCACTGGCATCCCAGCCAGGTTCAGTGGCAGT |
| | | | | GGGTCTGGGACAGACTTCACTCTCACCATCAGCAGACTGGAGCCTGAAGATTTTGCGGTGTATTA |
| | | | | CTGTCAGCAGTTTGGTGATTCACTTTGGACGTTCGGCCAGGGGACCAAGCTGGAAATCAAA |
| 283 | VH-P of | artificial | | EVQLLESGGGLVQPGGSLRLSCAASGFTFSSYAMSWVRQAPGKGLEWVASISSGNIIYYPDNVKG |
| | IgE-G9 | | | RFTISRDNSKNTLYLQMNSLRAEDTAVYYCTRGRSTYGGFDHWGQGTTVTVSS |
| 284 | VH-P of | artificial | | GAGGTGCAGCTGCTCGAGTCTGGGGGAGGCCTTGTGCAGCCTGGAGGGTCTCTGAGGCTCTCCTG |
| | IgE-G9 | | | TGCAGCCTCTGGATTCACTTTCAGTAGTTATGCCATGTCTTGGGTTCGCCAGGCTCCAGGGAAGG |
| | | | | GGCTGGAGTGGGTCGCTTCCATTAGTAGTGGTAATATCATCTACTATCCAGACAATGTGAAGGGC |
| | | | | CGATTCACCATCTCTAGAGATAATTCCAAGAACACCCTGTACCTGCAAATGAACAGTCTGAGGGC |
| | | | | TGAGGACACGGCCGTGTATTATTGTACTAGAGGCCGCAGTACCTACGGGGGATTTGACCACTGGG |
| | | | | GCCAAGGCACCACAGTCACCGTCTCCTCA |
| 285 | VL-P of | artificial | | ELVMTQSPATLSVSPGERVTLSCWASQGVSNNLAWYQQRPGQAPRLLIYDAFNRATGIPARFSGS |
| | IgE-G9 | | | GSGTDFTLTISRLEPEDFAVYYCQQFGDSLWTFGQGTKLEIK |
| 286 | VL-P of | artificial | | GAGCTCGTGATGACACAGTCTCCAGCCACCCTGTCTGTGTCTCCAGGGGAAAGAGTCACCCTCTC |
| | IgE-G9 | | | CTGCTGGGCCAGTCAGGGTGTGAGCAACAACTTAGCCTGGTACCAGCAGAGACCTGGCCAGGCTC |
| | | | | CCAGGCTCCTCATCTATGATGCATTCAACAGGGCCACTGGCATCCCAGCCAGGTTCAGTGGCAGT |
| | | | | GGGTCTGGGACAGACTTCACTCTCACCATCAGCAGACTGGAGCCTGAAGATTTTGCGGTGTATTA |
| | | | | CTGTCAGCAGTTTGGTGATTCACTTTGGACGTTCGGCCAGGGGACCAAGCTGGAAATCAAA |
| 287 | VH-VL of IgE-G9 | artificial | aa | EVQLLESGGGLVQPGGSLRLSCAASGFTFSSYAMSWVRQAPGKGLEWVASISSGNIIYYPDNVKG |
| | | | | RFTISRDNSKNTLYLQMNSLRAEDTAVYYCTRGRSTYGGFDHWGQGTTVTVSSGGGGSGGGGSGG |
| | | | | GGSEIVMTQSPATLSVSPGERVTLSCWASQGVSNNLAWYQQRPGQAPRLLIYDAFNRATGIPARF |
| | | | | SGSGSGTDFTLTISRLEPEDFAVYYCQQFGDSLWTFGQGTKLEIK |
| 288 | VH-VL of IgE-G9 | artificial | nt | GAGGTGCAGCTGCTCGAGTCTGGGGGAGGCCTTGTGCAGCCTGGAGGGTCTCTGAGGCTCTCCTG |
| | | | | TGCAGCCTCTGGATTCACTTTCAGTAGTTATGCCATGTCTTGGGTTCGCCAGGCTCCAGGGAAGG |
| | | | | GGCTGGAGTGGGTCGCTTCCATTAGTAGTGGTAATATCATCTACTATCCAGACAATGTGAAGGGC |
| | | | | CGATTCACCATCTCTAGAGATAATTCCAAGAACACCCTGTACCTGCAAATGAACAGTCTGAGGGC |
| | | | | TGAGGACACGGCCGTGTATTATTGTACTAGAGGCCGCAGTACCTACGGGGGATTTGACCACTGGG |
| | | | | GCCAAGGCACCACAGTCACCGTCTCCTCAGGTGGTGGTGGTTCTGGCGGCGGCGGCTCCGGTGGT |
| | | | | GGTGGTTCTGAGATCGTGATGACACAGTCTCCAGCCACCCTGTCTGTGTCTCCAGGGGAAAGAGT |
| | | | | CACCCTCTCCTGCTGGGCCAGTCAGGGTGTGAGCAACAACTTAGCCTGGTACCAGCAGAGACCTG |
| | | | | GCCAGGCTCCCAGGCTCCTCATCTATGATGCATTCAACAGGGCCACTGGCATCCCAGCCAGGTTC |
| | | | | AGTGGCAGTGGGTCTGGGACAGACTTCACTCTCACCATCAGCAGACTGGAGCCTGAAGATTTTGC |
| | | | | GGTGTATTACTGTCAGCAGTTTGGTGATTCACTTTGGACGTTCGGCCAGGGGACCAAGCTGGAAA |
| | | | | TCAAA |
| 289 | VH-VL-P of IgE- | artificial | aa | EVQLLESGGGLVQPGGSLRLSCAASGFTFSSYAMSWVRQAPGKGLEWVASISSGNIIYYPDNVKG |
| | G9 | | | RFTISRDNSKNTLYLQMNSLRAEDTAVYYCTRGRSTYGGFDHWGQGTTVTVSSGGGGSGGGGSGG |
| | | | | GGSELVMTQSPATLSVSPGERVTLSCWASQGVSNNLAWYQQRPGQAPRLLIYDAFNRATGIPARF |
| | | | | SGSGSGTDFTLTISRLEPEDFAVYYCQQFGDSLWTFGQGTKLEIK |
| 290 | VH-VL-P of IgE- | artificial | nt | GAGGTGCAGCTGCTCGAGTCTGGGGGAGGCCTTGTGCAGCCTGGAGGGTCTCTGAGGCTCTCCTG |
| | G9 | | | TGCAGCCTCTGGATTCACTTTCAGTAGTTATGCCATGTCTTGGGTTCGCCAGGCTCCAGGGAAGG |
| | | | | GGCTGGAGTGGGTCGCTTCCATTAGTAGTGGTAATATCATCTACTATCCAGACAATGTGAAGGGC |
| | | | | CGATTCACCATCTCTAGAGATAATTCCAAGAACACCCTGTACCTGCAAATGAACAGTCTGAGGGC |
| | | | | TGAGGACACGGCCGTGTATTATTGTACTAGAGGCCGCAGTACCTACGGGGGATTTGACCACTGGG |
| | | | | GCCAAGGCACCACAGTCACCGTCTCCTCAGGTGGTGGTGGTTCTGGCGGCGGCGGCTCCGGTGGT |
| | | | | GGTGGTTCTGAGCTCGTGATGACACAGTCTCCAGCCACCCTGTCTGTGTCTCCAGGGGAAAGAGT |
| | | | | CACCCTCTCCTGCTGGGCCAGTCAGGGTGTGAGCAACAACTTAGCCTGGTACCAGCAGAGACCTG |
| | | | | GCCAGGCTCCCAGGCTCCTCATCTATGATGCATTCAACAGGGCCACTGGCATCCCAGCCAGGTTC |
| | | | | AGTGGCAGTGGGTCTGGGACAGACTTCACTCTCACCATCAGCAGACTGGAGCCTGAAGATTTTGC |
| | | | | GGTGTATTACTGTCAGCAGTTTGGTGATTCACTTTGGACGTTCGGCCAGGGGACCAAGCTGGAAA |
| | | | | TCAAA |
| 291 | EGF-R 21-63 VL- | artificial | aa | DIVLTQSPASLPVSLGQRATISCRASQSVSSSTYSYIHWYQQKPGQPPKLLITYASNLESGVPAR |
| | VH × F6A VH-VL-P | | | FSGSGSGTDFTLDIHPVEEDDSSTYYCQHSWEIPFTFGSGTKLEIKGGGGSGGGGSGGGGSQVQL |
| | | | | QQSGPDLVKPGASVKMSCKASGHTFTDCVIIWVKQRAGQGLEWIGQIYPGTGRSYYNEIFKGKAT |
| | | | | LTADKSSNTVHIQLSSLTSEDSAVYFCALSTLIHGTWFSYWGQGTLVTVSSGGGGSEVQLLESGG |
| | | | | GLVQPGGSLKLSCAASGFTFNIYAMNWVRQAPGKGLEWVARIRSKYNNYATYYADSVKSRFTISR |
| | | | | DDSKNTAYLQMNNLKTEDTAVYYCVRHGNFGNSYVSFFAYWGQGTLVTVSSGGGGSGGGGSGGGG |
| | | | | SELVVTQEPSLTVSPGGTVTLTCGSSTGAVTSGYYPNWVQQKPGQAPRGLIGGTKFLAPGTPARF |
| | | | | SGSLLGGKAALTLSGVQPEDEAEYYCALWYSNRWVFGGGTKLTVL |
| 292 | EGF-R 21-63 VL- | artificial | nt | GACATTGTGCTGACACAGTCTCCTGCTTCCTTACCTGTGTCTCTGGGGCAGAGGGCCACCATCTC |
| | VH × F6A VH-VL-P | | | ATGCAGGGCCAGCCAAAGTGTCAGTTCATCTACTTATAGTTATATACACTGGTACCAACAGAAAC |
| | | | | CAGGACAGCCACCCAAACTCCTCATCACGTATGCATCCAACCTAGAATCTGGGGTCCCTGCCAGG |
| | | | | TTCAGTGGCAGTGGGTCTGGGACAGACTTCACCCTCGACATCCATCCTGTGGAGGAGGATGATTC |
| | | | | TTCAACATATTACTGTCAGCACAGTTGGGAGATTCCATTTACGTTCGGCTCGGGGACAAAGTTGG |
| | | | | AAATAAAAGGTGGTGGTGGTTCTGGCGGCGGCGGCTCCGGTGGTGGTGGTTCTCAGGTTCAGCTG |
| | | | | CAGCAGTCTGGACCTGATCTGGTGAAGCCTGGGGCCTCAGTGAAGATGTCCTGCAAGGCTTCTGG |
| | | | | ACACACTTTCACTGACTGTGTTATAATCTGGGTGAAACAGAGAGCTGGACAGGGCCTTGAGTGGA |
| | | | | TTGGACAGATTTATCCAGGGACTGGTCGTTCTTACTACAATGAGATTTTCAAGGGCAAGGCCACA |
| | | | | CTGACTGCAGACAAATCCTCCAACACAGTCCACATTCAACTCAGCAGCCTGACATCTGAGGACTC |
| | | | | TGCGGTCTATTTCTGTGCCCTATCTACTCTTATTCACGGGACCTGGTTTTCTTATTGGGGCCAAG |
| | | | | GGACTCTGGTCACTGTCTCTTCCGGAGGTGGTGGCTCCGAGGTGCAGCTGCTCGAGTCTGGAGGA |
| | | | | GGATTGGTGCAGCCTGGAGGGTCATTGAAACTCTCATGTGCAGCCTCTGGATTCACCTTCAATAT |
| | | | | CTACGCCATGAACTGGGTCCGCCAGGCTCCAGGAAAGGGTTTGGAATGGGTTGCTCGCATAAGAA |
| | | | | GTAAATATAATAATTATGCAACATATTATGCCGATTCAGTGAAAAGCAGGTTCACCATCTCCAGA |
| | | | | GATGATTCAAAAAACACTGCCTATCTACAAATGAACAACTTGAAAACTGAGGACACTGCCGTGTA |
| | | | | CTACTGTGTGAGACATGGGAACTTCGGTAATAGCTACGTATCCTTCTTCGCTTACTGGGGCCAAG |
| | | | | GGACTCTGGTCACCGTCTCCTCAGGTGGTGGTGGTTCTGGCGGCGGCGGCTCCGGTGGTGGTGGT |
| | | | | TCTGAGCTCGTTGTGACTCAGGAACCTTCACTCACCGTATCACCTGGTGGAACAGTCACACTCAC |
| | | | | TTGTGGCTCCTCGACTGGGGCTGTTACATCTGGCTACTACCCAAACTGGGTCCAACAAAAACCAG |
| | | | | GTCAGGCACCCCGTGGTCTAATAGGTGGGACTAAGTTCCTCGCCCCCGGTACTCCTGCCAGATTC |
| | | | | TCAGGCTCCCTGCTTGGAGGCAAGGCTGCCCTCACCCTCTCAGGGGTACAGCCAGAGGATGAGGC |
| | | | | AGAATATTACTGTGCTCTATGGTACAGCAACCGCTGGGTGTTCGGTGGAGGAACCAAACTGACTG |
| | | | | TCCTA |
| 293 | EGF-R 21-63 VL- | artificial | aa | DIVLTQSPASLPVSLGQRATISCRASQSVSSSTYSYIHWYQQKPGQPPKLLITYASNLESGVPAR |
| | VH × H2C VH-VL | | | FSGSGSGTDFTLDIHPVEEDDSSTYYCQHSWEIPFTFGSGTKLEIKGGGGSGGGGSGGGGSQVQL |
| | | | | QQSGPDLVKPGASVKMSCKASGHTFTDCVIIWVKQRAGQGLEWIGQIYPGTGRSYYNEIFKGKAT |
| | | | | LTADKSSNTVHIQLSSLTSEDSAVYFCALSTLIHGTWFSYWGQGTLVTVSSGGGGSEVQLVESGG |
| | | | | GLVQPGGSLKLSCAASGFTFNKYAMNWVRQAPGKGLEWVARIRSKYNNYATYYADSVKDRFTISR |
| | | | | DDSKNTAYLQMNNLKTEDTAVYYCVRHGNFGNSYISYWAYWGQGTLVTVSSGGGGSGGGGSGGGG |
| | | | | SQTVVTQEPSLTVSPGGTVTLTCGSSTGAVTSGYYPNWVQQKPGQAPRGLIGGTKFLAPGTPARF |
| | | | | SGSLLGGKAALTLSGVQPEDEAEYYCALWYSNRWVFGGGTKLTVL |
| 294 | EGF-R 21-63 VL- | artificial | nt | GACATTGTGCTGACACAGTCTCCTGCTTCCTTACCTGTGTCTCTGGGGCAGAGGGCCACCATCTC |
| | VH × H2C VH-VL | | | ATGCAGGGCCAGCCAAAGTGTCAGTTCATCTACTTATAGTTATATACACTGGTACCAACAGAAAC |
| | | | | CAGGACAGCCACCCAAACTCCTCATCACGTATGCATCCAACCTAGAATCTGGGGTCCCTGCCAGG |
| | | | | TTCAGTGGCAGTGGGTCTGGGACAGACTTCACCCTCGACATCCATCCTGTGGAGGAGGATGATTC |
| | | | | TTCAACATATTACTGTCAGCACAGTTGGGAGATTCCATTTACGTTCGGCTCGGGGACAAAGTTGG |
| | | | | AAATAAAAGGTGGTGGTGGTTCTGGCGGCGGCGGCTCCGGTGGTGGTGGTTCTCAGGTTCAGCTG |
| | | | | CAGCAGTCTGGACCTGATCTGGTGAAGCCTGGGGCCTCAGTGAAGATGTCCTGCAAGGCTTCTGG |
| | | | | ACACACTTTCACTGACTGTGTTATAATCTGGGTGAAACAGAGAGCTGGACAGGGCCTTGAGTGGA |
| | | | | TTGGACAGATTTATCCAGGGACTGGTCGTTCTTACTACAATGAGATTTTCAAGGGCAAGGCCACA |
| | | | | CTGACTGCAGACAAATCCTCCAACACAGTCCACATTCAACTCAGCAGCCTGACATCTGAGGACTC |
| | | | | TGCGGTCTATTTCTGTGCCCTATCTACTCTTATTCACGGGACCTGGTTTTCTTATTGGGGCCAAG |
| | | | | GGACTCTGGTCACTGTCTCTTCCGGAGGTGGTGGCTCCGAGGTGCAGCTGGTCGAGTCTGGAGGA |
| | | | | GGATTGGTGCAGCCTGGAGGGTCATTGAAACTCTCATGTGCAGCCTCTGGATTCACCTTCAATAA |
| | | | | GTACGCCATGAACTGGGTCCGCCAGGCTCCAGGAAAGGGTTTGGAATGGGTTGCTCGCATAAGAA |
| | | | | GTAAATATAATAATTATGCAACATATTATGCCGATTCAGTGAAAGACAGGTTCACCATCTCCAGA |
| | | | | GATGATTCAAAAAACACTGCCTATCTACAAATGAACAACTTGAAAACTGAGGACACTGCCGTGTA |
| | | | | CTACTGTGTGAGACATGGGAACTTCGGTAATAGCTACATATCCTACTGGGCTTACTGGGGCCAAG |
| | | | | GGACTCTGGTCACCGTCTCCTCAGGTGGTGGTGGTTCTGGCGGCGGCGGCTCCGGTGGTGGTGGT |
| | | | | TCTCAGACTGTTGTGACTCAGGAACCTTCACTCACCGTATCACCTGGTGGAACAGTCACACTCAC |
| | | | | TTGTGGCTCCTCGACTGGGGCTGTTACATCTGGCTACTACCCAAACTGGGTCCAACAAAAACCAG |
| | | | | GTCAGGCACCCCGTGGTCTAATAGGTGGGACTAAGTTCCTCGCCCCCGGTACTCCTGCCAGATTC |
| | | | | TCAGGCTCCCTGCTTGGAGGCAAGGCTGCCCTCACCCTCTCAGGGGTACAGCCAGAGGATGAGGC |
| | | | | AGAATATTACTGTGCTCTATGGTACAGCAACCGCTGGGTGTTCGGTGGAGGAACCAAACTGACTG |
| | | | | TCCTA |
| 295 | EGF-R 21-63 VL- | artificial | aa | DIVLTQSPASLPVSLGQRATISCRASQSVSSSTYSYIHWYQQKPGQPPKLLITYASNLESGVPAR |
| | VH × H2C VH-VL-P | | | FSGSGSGTDFTLDIHPVEEDDSSTYYCQHSWEIPFTFGSGTKLEIKGGGGSGGGGSGGGGSQVQL |
| | | | | QQSGPDLVKPGASVKMSCKASGHTFTDCVIIWVKQRAGQGLEWIGQIYPGTGRSYYNEIFKGKAT |
| | | | | LTADKSSNTVHIQLSSLTSEDSAVYFCALSTLIHGTWFSYWGQGTLVTVSSGGGGSEVQLLESGG |
| | | | | GLVQPGGSLKLSCAASGFTFNKYAMNWVRQAPGKGLEWVARIRSKYNNYATYYADSVKDRFTISR |
| | | | | DDSKNTAYLQMNNLKTEDTAVYYCVRHGNFGNSYISYWAYWGQGTLVTVSSGGGGSGGGGSGGGG |
| | | | | SELVVTQEPSLTVSPGGTVTLTCGSSTGAVTSGYYPNWVQQKPGQAPRGLIGGTKFLAPGTPARF |
| | | | | SGSLLGGKAALTLSGVQPEDEAEYYCALWYSNRWVFGGGTKLTVL |
| 296 | EGF-R 21-63 VL- | artificial | nt | GACATTGTGCTGACACAGTCTCCTGCTTCCTTACCTGTGTCTCTGGGGCAGAGGGCCACCATCTC |
| | VH × H2C VH-VL-P | | | ATGCAGGGCCAGCCAAAGTGTCAGTTCATCTACTTATAGTTATATACACTGGTACCAACAGAAAC |
| | | | | CAGGACAGCCACCCAAACTCCTCATCACGTATGCATCCAACCTAGAATCTGGGGTCCCTGCCAGG |
| | | | | TTCAGTGGCAGTGGGTCTGGGACAGACTTCACCCTCGACATCCATCCTGTGGAGGAGGATGATTC |
| | | | | TTCAACATATTACTGTCAGCACAGTTGGGAGATTCCATTTACGTTCGGCTCGGGGACAAAGTTGG |
| | | | | AAATAAAAGGTGGTGGTGGTTCTGGCGGCGGCGGCTCCGGTGGTGGTGGTTCTCAGGTTCAGCTG |
| | | | | CAGCAGTCTGGACCTGATCTGGTGAAGCCTGGGGCCTCAGTGAAGATGTCCTGCAAGGCTTCTGG |
| | | | | ACACACTTTCACTGACTGTGTTATAATCTGGGTGAAACAGAGAGCTGGACAGGGCCTTGAGTGGA |
| | | | | TTGGACAGATTTATCCAGGGACTGGTCGTTCTTACTACAATGAGATTTTCAAGGGCAAGGCCACA |
| | | | | CTGACTGCAGACAAATCCTCCAACACAGTCCACATTCAACTCAGCAGCCTGACATCTGAGGACTC |
| | | | | TGCGGTCTATTTCTGTGCCCTATCTACTCTTATTCACGGGACCTGGTTTTCTTATTGGGGCCAAG |
| | | | | GGACTCTGGTCACTGTCTCTTCCGGAGGTGGTGGCTCCGAGGTGCAGCTGCTCGAGTCTGGAGGA |
| | | | | GGATTGGTGCAGCCTGGAGGGTCATTGAAACTCTCATGTGCAGCCTCTGGATTCACCTTCAATAA |
| | | | | GTACGCCATGAACTGGGTCCGCCAGGCTCCAGGAAAGGGTTTGGAATGGGTTGCTCGCATAAGAA |
| | | | | GTAAATATAATAATTATGCAACATATTATGCCGATTCAGTGAAAGACAGGTTCACCATCTCCAGA |
| | | | | GATGATTCAAAAAACACTGCCTATCTACAAATGAACAACTTGAAAACTGAGGACACTGCCGTGTA |
| | | | | CTACTGTGTGAGACATGGGAACTTCGGTAATAGCTACATATCCTACTGGGCTTACTGGGGCCAAG |
| | | | | GGACTCTGGTCACCGTCTCCTCAGGTGGTGGTGGTTCTGGCGGCGGCGGCTCCGGTGGTGGTGGT |
| | | | | TCTGAGCTCGTTGTGACTCAGGAACCTTCACTCACCGTATCACCTGGTGGAACAGTCACACTCAC |
| | | | | TTGTGGCTCCTCGACTGGGGCTGTTACATCTGGCTACTACCCAAACTGGGTCCAACAAAAACCAG |
| | | | | GTCAGGCACCCCGTGGTCTAATAGGTGGGACTAAGTTCCTCGCCCCCGGTACTCCTGCCAGATTC |
| | | | | TCAGGCTCCCTGCTTGGAGGCAAGGCTGCCCTCACCCTCTCAGGGGTACAGCCAGAGGATGAGGC |
| | | | | AGAATATTACTGTGCTCTATGGTACAGCAACCGCTGGGTGTTCGGTGGAGGAACCAAACTGACTG |
| | | | | TCCTA |
| 297 | EGF-R 21-63 VL- | artificial | aa | DIVLTQSPASLPVSLGQRATISCRASQSVSSSTYSYIHWYQQKPGQPPKLLITYASNLESGVPAR |
| | VH × H1E VH-VL-P | | | FSGSGSGTDFTLDIHPVEEDDSSTYYCQHSWEIPFTFGSGTKLEIKGGGGSGGGGSGGGGSQVQL |
| | | | | QQSGPDLVKPGASVKMSCKASGHTFTDCVIIWVKQRAGQGLEWIGQIYPGTGRSYYNEIFKGKAT |
| | | | | LTADKSSNTVHIQLSSLTSEDSAVYFCALSTLIHGTWFSYWGQGTLVTVSSGGGGSEVQLLESGG |
| | | | | GLEQPGGSLKLSCAASGFTFNSYAMNWVRQAPGKGLEWVARIRSKYNNYATYYADSVKGRFTISR |
| | | | | DDSKNTAYLQMNNLKTEDTAVYYCVRHGNFGNSYLSFWAYWGQGTLVTVSSGGGGSGGGGSGGGG |
| | | | | SELVVTQEPSLTVSPGGTVTLTCGSSTGAVTSGYYPNWVQQKPGQAPRGLIGGTKFLAPGTPARF |
| | | | | SGSLLGGKAALTLSGVQPEDEAEYYCALWYSNRWVFGGGTKLTVL |
| 298 | EGF-R 21-63 VL- | artificial | nt | GACATTGTGCTGACACAGTCTCCTGCTTCCTTACCTGTGTCTCTGGGGCAGAGGGCCACCATCTC |
| | VH × H1E VH-VL-P | | | ATGCAGGGCCAGCCAAAGTGTCAGTTCATCTACTTATAGTTATATACACTGGTACCAACAGAAAC |
| | | | | CAGGACAGCCACCCAAACTCCTCATCACGTATGCATCCAACCTAGAATCTGGGGTCCCTGCCAGG |
| | | | | TTCAGTGGCAGTGGGTCTGGGACAGACTTCACCCTCGACATCCATCCTGTGGAGGAGGATGATTC |
| | | | | TTCAACATATTACTGTCAGCACAGTTGGGAGATTCCATTTACGTTCGGCTCGGGGACAAAGTTGG |
| | | | | AAATAAAAGGTGGTGGTGGTTCTGGCGGCGGCGGCTCCGGTGGTGGTGGTTCTCAGGTTCAGCTG |
| | | | | CAGCAGTCTGGACCTGATCTGGTGAAGCCTGGGGCCTCAGTGAAGATGTCCTGCAAGGCTTCTGG |
| | | | | ACACACTTTCACTGACTGTGTTATAATCTGGGTGAAACAGAGAGCTGGACAGGGCCTTGAGTGGA |
| | | | | TTGGACAGATTTATCCAGGGACTGGTCGTTCTTACTACAATGAGATTTTCAAGGGCAAGGCCACA |
| | | | | CTGACTGCAGACAAATCCTCCAACACAGTCCACATTCAACTCAGCAGCCTGACATCTGAGGACTC |
| | | | | TGCGGTCTATTTCTGTGCCCTATCTACTCTTATTCACGGGACCTGGTTTTCTTATTGGGGCCAAG |
| | | | | GGACTCTGGTCACTGTCTCTTCCGGAGGTGGTGGCTCCGAGGTGCAGCTGCTCGAGTCTGGAGGA |
| | | | | GGATTGGAGCAGCCTGGAGGGTCATTGAAACTCTCATGTGCAGCCTCTGGATTCACCTTCAATTC |
| | | | | GTACGCCATGAACTGGGTCCGCCAGGCTCCAGGAAAGGGTTTGGAATGGGTTGCTCGCATAAGAA |
| | | | | GTAAATATAATAATTATGCAACATATTATGCCGATTCAGTGAAAGGGAGGTTCACCATCTCCAGA |
| | | | | GATGATTCAAAAAACACTGCCTATCTACAAATGAACAACTTGAAAACTGAGGACACTGCCGTGTA |
| | | | | CTACTGTGTGAGACATGGGAACTTCGGTAATAGCTACCTATCCTTCTGGGCTTACTGGGGCCAAG |
| | | | | GGACTCTGGTCACCGTCTCCTCAGGTGGTGGTGGTTCTGGCGGCGGCGGCTCCGGTGGTGGTGGT |
| | | | | TCTGAGCTCGTTGTGACTCAGGAACCTTCACTCACCGTATCACCTGGTGGAACAGTCACACTCAC |
| | | | | TTGTGGCTCCTCGACTGGGGCTGTTACATCTGGCTACTACCCAAACTGGGTCCAACAAAAACCAG |
| | | | | GTCAGGCACCCCGTGGTCTAATAGGTGGGACTAAGTTCCTCGCCCCCGGTACTCCTGCCAGATTC |
| | | | | TCAGGCTCCCTGCTTGGAGGCAAGGCTGCCCTCACCCTCTCAGGGGTACAGCCAGAGGATGAGGC |
| | | | | AGAATATTACTGTGCTCTATGGTACAGCAACCGCTGGGTGTTCGGTGGAGGAACCAAACTGACTG |
| | | | | TCCTA |
| 299 | EGF-R 21-63 VL- | artificial | aa | DIVLTQSPASLPVSLGQRATISCRASQSVSSSTYSYIHWYQQKPGQPPKLLITYASNLESGVPAR |
| | VH × G4H VH- | | | FSGSGSGTDFTLDIHPVEEDDSSTYYCQHSWEIPFTFGSGTKLEIKGGGGSGGGGSGGGGSQVQL |
| | VL-P | | | QQSGPDLVKPGASVKMSCKASGHTFTDCVIIWVKQRAGQGLEWIGQIYPGTGRSYYNEIFKGKAT |
| | | | | LTADKSSNTVHIQLSSLTSEDSAVYFCALSTLIHGTWFSYWGQGTLVTVSSGGGGSEVQLLESGG |
| | | | | GLVQPGGSLKLSCAASGFTFNRYAMNWVRQAPGKGLEWVARIRSKYNNYATYYADSVKGRFTISR |
| | | | | DDSKNTAYLQMNNLKTEDTAVYYCVRHGNFGNSYLSYFAYWGQGTLVTVSSGGGGSGGGGSGGGG |
| | | | | SELVVTQEPSLTVSPGGTVTLTCGSSTGAVTSGYYPNWVQQKPGQAPRGLIGGTKFLAPGTPARF |
| | | | | SGSLLGGKAALTLSGVQPEDEAEYYCALWYSNRWVFGGGTKLTVL |
| 300 | EGF-R 21-63 VL- | artificial | nt | GACATTGTGCTGACACAGTCTCCTGCTTCCTTACCTGTGTCTCTGGGGCAGAGGGCCACCATCTC |
| | VH × G4H VH- | | | ATGCAGGGCCAGCCAAAGTGTCAGTTCATCTACTTATAGTTATATACACTGGTACCAACAGAAAC |
| | VL-P | | | CAGGACAGCCACCCAAACTCCTCATCACGTATGCATCCAACCTAGAATCTGGGGTCCCTGCCAGG |
| | | | | TTCAGTGGCAGTGGGTCTGGGACAGACTTCACCCTCGACATCCATCCTGTGGAGGAGGATGATTC |
| | | | | TTCAACATATTACTGTCAGCACAGTTGGGAGATTCCATTTACGTTCGGCTCGGGGACAAAGTTGG |
| | | | | AAATAAAAGGTGGTGGTGGTTCTGGCGGCGGCGGCTCCGGTGGTGGTGGTTCTCAGGTTCAGCTG |
| | | | | CAGCAGTCTGGACCTGATCTGGTGAAGCCTGGGGCCTCAGTGAAGATGTCCTGCAAGGCTTCTGG |
| | | | | ACACACTTTCACTGACTGTGTTATAATCTGGGTGAAACAGAGAGCTGGACAGGGCCTTGAGTGGA |
| | | | | TTGGACAGATTTATCCAGGGACTGGTCGTTCTTACTACAATGAGATTTTCAAGGGCAAGGCCACA |
| | | | | CTGACTGCAGACAAATCCTCCAACACAGTCCACATTCAACTCAGCAGCCTGACATCTGAGGACTC |
| | | | | TGCGGTCTATTTCTGTGCCCTATCTACTCTTATTCACGGGACCTGGTTTTCTTATTGGGGCCAAG |
| | | | | GGACTCTGGTCACTGTCTCTTCCGGAGGTGGTGGCTCCGAGGTGCAGCTGCTCGAGTCTGGAGGA |
| | | | | GGATTGGTGCAGCCTGGAGGGTCATTGAAACTCTCATGTGCAGCCTCTGGATTCACCTTCAATCG |
| | | | | CTACGCCATGAACTGGGTCCGCCAGGCTCCAGGAAAGGGTTTGGAATGGGTTGCTCGCATAAGAA |
| | | | | GTAAATATAATAATTATGCAACATATTATGCCGATTCAGTGAAAGGGAGGTTCACCATCTCCAGA |
| | | | | GATGATTCAAAAAACACTGCCTATCTACAAATGAACAACTTGAAAACTGAGGACACTGCCGTGTA |
| | | | | CTACTGTGTGAGACATGGGAACTTCGGTAATAGCTACTTATCCTACTTCGCTTACTGGGGCCAAG |
| | | | | GGACTCTGGTCACCGTCTCCTCAGGTGGTGGTGGTTCTGGCGGCGGCGGCTCCGGTGGTGGTGGT |
| | | | | TCTGAGCTCGTTGTGACTCAGGAACCTTCACTCACCGTATCACCTGGTGGAACAGTCACACTCAC |
| | | | | TTGTGGCTCCTCGACTGGGGCTGTTACATCTGGCTACTACCCAAACTGGGTCCAACAAAAACCAG |
| | | | | GTCAGGCACCCCGTGGTCTAATAGGTGGGACTAAGTTCCTCGCCCCCGGTACTCCTGCCAGATTC |
| | | | | TCAGGCTCCCTGCTTGGAGGCAAGGCTGCCCTCACCCTCTCAGGGGTACAGCCAGAGGATGAGGC |
| | | | | AGAATATTACTGTGCTCTATGGTACAGCAACCGCTGGGTGTTCGGTGGAGGAACCAAACTGACTG |
| | | | | TCCTA |
| 301 | EGF-R 21-63 VL- | artificial | aa | DIVLTQSPASLPVSLGQRATISCRASQSVSSSTYSYIHWYQQKPGQPPKLLITYASNLESGVPAR |
| | VH × A2J VH-VL-P | | | FSGSGSGTDFTLDIHPVEEDDSSTYYCQHSWEIPFTFGSGTKLEIKGGGGSGGGGSGGGGSQVQL |
| | | | | QQSGPDLVKPGASVKMSCKASGHTFTDCVIIWVKQRAGQGLEWIGQIYPGTGRSYYNEIFKGKAT |
| | | | | LTADKSSNTVHIQLSSLTSEDSAVYFCALSTLIHGTWFSYWGQGTLVTVSSGGGGSEVQLLESGG |
| | | | | GLVQPGGSLKLSCAASGFTFNVYAMNWVRQAPGKGLEWVARIRSKYNNYATYYADSVKKRFTISR |
| | | | | DDSKNTAYLQMNNLKTEDTAVYYCVRHGNFGNSYLSWWAYWGQGTLVTVSSGGGGSGGGGSGGGG |
| | | | | SELVVTQEPSLTVSPGGTVTLTCRSSTGAVTSGYYPNWVQQKPGQAPRGLIGATDMRPSGTPARF |
| | | | | SGSLLGGKAALTLSGVQPEDEAEYYCALWYSNRWVFGGGTKLTVL |
| 302 | EGF-R 21-63 VL- | artificial | nt | GACATTGTGCTGACACAGTCTCCTGCTTCCTTACCTGTGTCTCTGGGGCAGAGGGCCACCATCTC |
| | VH × A2J VH-VL-P | | | ATGCAGGGCCAGCCAAAGTGTCAGTTCATCTACTTATAGTTATATACACTGGTACCAACAGAAAC |
| | | | | CAGGACAGCCACCCAAACTCCTCATCACGTATGCATCCAACCTAGAATCTGGGGTCCCTGCCAGG |
| | | | | TTCAGTGGCAGTGGGTCTGGGACAGACTTCACCCTCGACATCCATCCTGTGGAGGAGGATGATTC |
| | | | | TTCAACATATTACTGTCAGCACAGTTGGGAGATTCCATTTACGTTCGGCTCGGGGACAAAGTTGG |
| | | | | AAATAAAAGGTGGTGGTGGTTCTGGCGGCGGCGGCTCCGGTGGTGGTGGTTCTCAGGTTCAGCTG |
| | | | | CAGCAGTCTGGACCTGATCTGGTGAAGCCTGGGGCCTCAGTGAAGATGTCCTGCAAGGCTTCTGG |
| | | | | ACACACTTTCACTGACTGTGTTATAATCTGGGTGAAACAGAGAGCTGGACAGGGCCTTGAGTGGA |
| | | | | TTGGACAGATTTATCCAGGGACTGGTCGTTCTTACTACAATGAGATTTTCAAGGGCAAGGCCACA |
| | | | | CTGACTGCAGACAAATCCTCCAACACAGTCCACATTCAACTCAGCAGCCTGACATCTGAGGACTC |
| | | | | TGCGGTCTATTTCTGTGCCCTATCTACTCTTATTCACGGGACCTGGTTTTCTTATTGGGGCCAAG |
| | | | | GGACTCTGGTCACTGTCTCTTCCGGAGGTGGTGGCTCCGAGGTGCAGCTGCTCGAGTCTGGAGGA |
| | | | | GGATTGGTGCAGCCTGGAGGGTCATTGAAACTCTCATGTGCAGCCTCTGGATTCACCTTCAATGT |
| | | | | CTACGCCATGAACTGGGTCCGCCAGGCTCCAGGAAAGGGTTTGGAATGGGTTGCTCGCATAAGAA |
| | | | | GTAAATATAATAATTATGCAACATATTATGCCGATTCAGTGAAAAAGAGGTTCACCATCTCCAGA |
| | | | | GATGATTCAAAAAACACTGCCTATCTACAAATGAACAACTTGAAAACTGAGGACACTGCCGTGTA |
| | | | | CTACTGTGTGAGACATGGGAACTTCGGTAATAGCTACTTATCCTGGTGGGCTTACTGGGGCCAAG |
| | | | | GGACTCTGGTCACCGTCTCCTCAGGTGGTGGTGGTTCTGGCGGCGGCGGCTCCGGTGGTGGTGGT |
| | | | | TCTGAGCTCGTTGTGACTCAGGAACCTTCACTCACCGTATCACCTGGTGGAACAGTCACACTCAC |
| | | | | TTGTCGCTCCTCGACTGGGGCTGTTACATCTGGCTACTACCCAAACTGGGTCCAACAAAAACCAG |
| | | | | GTCAGGCACCCCGTGGTCTAATAGGTGCCACTGACATGAGGCCCTCTGGTACTCCTGCCAGATTC |
| | | | | TCAGGCTCCCTGCTTGGAGGCAAGGCTGCCCTCACCCTCTCAGGGGTACAGCCAGAGGATGAGGC |
| | | | | AGAATATTACTGTGCTCTATGGTACAGCAACCGCTGGGTGTTCGGTGGAGGAACCAAACTGACTG |
| | | | | TCCTA |
| 303 | EGF-R 21-63 VL- | artificial | aa | DIVLTQSPASLPVSLGQRATISCRASQSVSSSTYSYIHWYQQKPGQPPKLLITYASNLESGVPAR |
| | VH × E1L VH-VL-P | | | FSGSGSGTDFTLDIHPVEEDDSSTYYCQHSWEIPFTFGSGTKLEIKGGGGSGGGGSGGGGSQVQL |
| | | | | QQSGPDLVKPGASVKMSCKASGHTFTDCVIIWVKQRAGQGLEWIGQIYPGTGRSYYNEIFKGKAT |
| | | | | LTADKSSNTVHIQLSSLTSEDSAVYFCALSTLIHGTWFSYWGQGTLVTVSSGGGGSEVQLLESGG |
| | | | | GLVQPGGSLKLSCAASGFTFNKYAMNWVRQAPGKGLEWVARIRSKYNNYATYYADSVKSRFTISR |
| | | | | DDSKNTAYLQMNNLKTEDTAVYYCVRHGNFGNSYTSYYAYWGQGTLVTVSSGGGGSGGGGSGGGG |
| | | | | SELVVTQEPSLTVSPGGTVTLTCGSSTGAVTSGYYPNWVQQKPGQAPRGLIGGTKFLAPGTPARF |
| | | | | SGSLLGGKAALTLSGVQPEDEAEYYCALWYSNRWVFGGGTKLTVL |
| 304 | EGF-R 21-63 VL- | artificial | nt | GACATTGTGCTGACACAGTCTCCTGCTTCCTTACCTGTGTCTCTGGGGCAGAGGGCCACCATCTC |
| | VH × E1L VH-VL-P | | | ATGCAGGGCCAGCCAAAGTGTCAGTTCATCTACTTATAGTTATATACACTGGTACCAACAGAAAC |
| | | | | CAGGACAGCCACCCAAACTCCTCATCACGTATGCATCCAACCTAGAATCTGGGGTCCCTGCCAGG |
| | | | | TTCAGTGGCAGTGGGTCTGGGACAGACTTCACCCTCGACATCCATCCTGTGGAGGAGGATGATTC |
| | | | | TTCAACATATTACTGTCAGCACAGTTGGGAGATTCCATTTACGTTCGGCTCGGGGACAAAGTTGG |
| | | | | AAATAAAAGGTGGTGGTGGTTCTGGCGGCGGCGGCTCCGGTGGTGGTGGTTCTCAGGTTCAGCTG |
| | | | | CAGCAGTCTGGACCTGATCTGGTGAAGCCTGGGGCCTCAGTGAAGATGTCCTGCAAGGCTTCTGG |
| | | | | ACACACTTTCACTGACTGTGTTATAATCTGGGTGAAACAGAGAGCTGGACAGGGCCTTGAGTGGA |
| | | | | TTGGACAGATTTATCCAGGGACTGGTCGTTCTTACTACAATGAGATTTTCAAGGGCAAGGCCACA |
| | | | | CTGACTGCAGACAAATCCTCCAACACAGTCCACATTCAACTCAGCAGCCTGACATCTGAGGACTC |
| | | | | TGCGGTCTATTTCTGTGCCCTATCTACTCTTATTCACGGGACCTGGTTTTCTTATTGGGGCCAAG |
| | | | | GGACTCTGGTCACTGTCTCTTCCGGAGGTGGTGGCTCCGAGGTGCAGCTGCTCGAGTCTGGAGGA |
| | | | | GGATTGGTGCAGCCTGGAGGGTCATTGAAACTCTCATGTGCAGCCTCTGGATTCACCTTCAATAA |
| | | | | GTACGCCATGAACTGGGTCCGCCAGGCTCCAGGAAAGGGTTTGGAATGGGTTGCTCGCATAAGAA |
| | | | | GTAAATATAATAATTATGCAACATATTATGCCGATTCAGTGAAATCGAGGTTCACCATCTCCAGA |
| | | | | GATGATTCAAAAAACACTGCCTATCTACAAATGAACAACTTGAAAACTGAGGACACTGCCGTGTA |
| | | | | CTACTGTGTGAGACATGGGAACTTCGGTAATAGCTACACATCCTACTACGCTTACTGGGGCCAAG |
| | | | | GGACTCTGGTCACCGTCTCCTCAGGTGGTGGTGGTTCTGGCGGCGGCGGCTCCGGTGGTGGTGGT |
| | | | | TCTGAGCTCGTTGTGACTCAGGAACCTTCACTCACCGTATCACCTGGTGGAACAGTCACACTCAC |
| | | | | TTGTGGCTCCTCGACTGGGGCTGTTACATCTGGCTACTACCCAAACTGGGTCCAACAAAAACCAG |
| | | | | GTCAGGCACCCCGTGGTCTAATAGGTGGGACTAAGTTCCTCGCCCCCGGTACTCCTGCCAGATTC |
| | | | | TCAGGCTCCCTGCTTGGAGGCAAGGCTGCCCTCACCCTCTCAGGGGTACAGCCAGAGGATGAGGC |
| | | | | AGAATATTACTGTGCTCTATGGTACAGCAACCGCTGGGTGTTCGGTGGAGGAACCAAACTGACTG |
| | | | | TCCTA |
| 305 | EGF-R 21-63 VL- | artificial | aa | DIVLTQSPASLPVSLGQRATISCRASQSVSSSTYSYIHWYQQKPGQPPKLLITYASNLESGVPAR |
| | VH × E2M VH- | | | FSGSGSGTDFTLDIHPVEEDDSSTYYCQHSWEIPFTFGSGTKLEIKGGGGSGGGGSGGGGSQVQL |
| | VL-P | | | QQSGPDLVKPGASVKMSCKASGHTFTDCVIIWVKQRAGQGLEWIGQIYPGTGRSYYNEIFKGKAT |
| | | | | LTADKSSNTVHIQLSSLTSEDSAVYFCALSTLIHGTWFSYWGQGTLVTVSSGGGGSEVQLLESGG |
| | | | | GLVQPGGSLKLSCAASGFTFNGYAMNWVRQAPGKGLEWVARIRSKYNNYATYYADSVKERFTISR |
| | | | | DDSKNTAYLQMNNLKTEDTAVYYCVRHRNFGNSYLSWFAYWGQGTLVTVSSGGGGSGGGGSGGGG |
| | | | | SELVVTQEPSLTVSPGGTVTLTCRSSTGAVTSGYYPNWVQQKPGQAPRGLIGATDMRPSGTPARF |
| | | | | SGSLLGGKAALTLSGVQPEDEAEYYCALWYSNRWVFGGGTKLTVL |
| 306 | EGF-R 21-63 VL- | artificial | nt | GACATTGTGCTGACACAGTCTCCTGCTTCCTTACCTGTGTCTCTGGGGCAGAGGGCCACCATCTC |
| | VH × E2M VH- | | | ATGCAGGGCCAGCCAAAGTGTCAGTTCATCTACTTATAGTTATATACACTGGTACCAACAGAAAC |
| | VL-P | | | CAGGACAGCCACCCAAACTCCTCATCACGTATGCATCCAACCTAGAATCTGGGGTCCCTGCCAGG |
| | | | | TTCAGTGGCAGTGGGTCTGGGACAGACTTCACCCTCGACATCCATCCTGTGGAGGAGGATGATTC |
| | | | | TTCAACATATTACTGTCAGCACAGTTGGGAGATTCCATTTACGTTCGGCTCGGGGACAAAGTTGG |
| | | | | AAATAAAAGGTGGTGGTGGTTCTGGCGGCGGCGGCTCCGGTGGTGGTGGTTCTCAGGTTCAGCTG |
| | | | | CAGCAGTCTGGACCTGATCTGGTGAAGCCTGGGGCCTCAGTGAAGATGTCCTGCAAGGCTTCTGG |
| | | | | ACACACTTTCACTGACTGTGTTATAATCTGGGTGAAACAGAGAGCTGGACAGGGCCTTGAGTGGA |
| | | | | TTGGACAGATTTATCCAGGGACTGGTCGTTCTTACTACAATGAGATTTTCAAGGGCAAGGCCACA |
| | | | | CTGACTGCAGACAAATCCTCCAACACAGTCCACATTCAACTCAGCAGCCTGACATCTGAGGACTC |
| | | | | TGCGGTCTATTTCTGTGCCCTATCTACTCTTATTCACGGGACCTGGTTTTCTTATTGGGGCCAAG |
| | | | | GGACTCTGGTCACTGTCTCTTCCGGAGGTGGTGGCTCCGAGGTGCAGCTGCTCGAGTCTGGAGGA |
| | | | | GGATTGGTGCAGCCTGGAGGGTCATTGAAACTCTCATGTGCAGCCTCTGGATTCACCTTCAATGG |
| | | | | CTACGCCATGAACTGGGTCCGCCAGGCTCCAGGAAAGGGTTTGGAATGGGTTGCTCGCATAAGAA |
| | | | | GTAAATATAATAATTATGCAACATATTATGCCGATTCAGTGAAAGAGAGGTTCACCATCTCCAGA |
| | | | | GATGATTCAAAAAACACTGCCTATCTACAAATGAACAACTTGAAAACTGAGGACACTGCCGTGTA |
| | | | | CTACTGTGTGAGACATAGGAACTTCGGTAATAGCTACTTATCCTGGTTCGCTTACTGGGGCCAAG |
| | | | | GGACTCTGGTCACCGTCTCCTCAGGTGGTGGTGGTTCTGGCGGCGGCGGCTCCGGTGGTGGTGGT |
| | | | | TCTGAGCTCGTTGTGACTCAGGAACCTTCACTCACCGTATCACCTGGTGGAACAGTCACACTCAC |
| | | | | TTGTCGCTCCTCGACTGGGGCTGTTACATCTGGCTACTACCCAAACTGGGTCCAACAAAAACCAG |
| | | | | GTCAGGCACCCCGTGGTCTAATAGGTGCCACTGACATGAGGCCCTCTGGTACTCCTGCCAGATTC |
| | | | | TCAGGCTCCCTGCTTGGAGGCAAGGCTGCCCTCACCCTCTCAGGGGTACAGCCAGAGGATGAGGC |
| | | | | AGAATATTACTGTGCTCTATGGTACAGCAACCGCTGGGTGTTCGGTGGAGGAACCAAACTGACTG |
| | | | | TCCTA |
| 307 | EGF-R 21-63 VL- | artificial | aa | DIVLTQSPASLPVSLGQRATISCRASQSVSSSTYSYIHWYQQKPGQPPKLLITYASNLESGVPAR |
| | VH × F7O VH-VL-P | | | FSGSGSGTDFTLDIHPVEEDDSSTYYCQHSWEIPFTFGSGTKLEIKGGGGSGGGGSGGGGSQVQL |
| | | | | QQSGPDLVKPGASVKMSCKASGHTFTDCVIIWVKQRAGQGLEWIGQIYPGTGRSYYNEIFKGKAT |
| | | | | LTADKSSNTVHIQLSSLTSEDSAVYFCALSTLIHGTWFSYWGQGTLVTVSSGGGGSEVQLLESGG |
| | | | | GLVQPGGSLKLSCAASGFTFNVYAMNWVRQAPGKGLEWVARIRSKYNNYATYYADSVKKRFTISR |
| | | | | DDSKNTAYLQMNNLKTEDTAVYYCVRHGNFGNSYISWWAYWGQGTLVTVSSGGGGSGGGGSGGGG |
| | | | | SELVVTQEPSLTVSPGGTVTLTCGSSTGAVTSGYYPNWVQQKPGQAPRGLIGGTKFLAPGTPARF |
| | | | | SGSLLGGKAALTLSGVQPEDEAEYYCALWYSNRWVFGGGTKLTVL |
| 308 | EGF-R 21-63 VL- | artificial | nt | GACATTGTGCTGACACAGTCTCCTGCTTCCTTACCTGTGTCTCTGGGGCAGAGGGCCACCATCTC |
| | VH × F7O VH-VL-P | | | ATGCAGGGCCAGCCAAAGTGTCAGTTCATCTACTTATAGTTATATACACTGGTACCAACAGAAAC |
| | | | | CAGGACAGCCACCCAAACTCCTCATCACGTATGCATCCAACCTAGAATCTGGGGTCCCTGCCAGG |
| | | | | TTCAGTGGCAGTGGGTCTGGGACAGACTTCACCCTCGACATCCATCCTGTGGAGGAGGATGATTC |
| | | | | TTCAACATATTACTGTCAGCACAGTTGGGAGATTCCATTTACGTTCGGCTCGGGGACAAAGTTGG |
| | | | | AAATAAAAGGTGGTGGTGGTTCTGGCGGCGGCGGCTCCGGTGGTGGTGGTTCTCAGGTTCAGCTG |
| | | | | CAGCAGTCTGGACCTGATCTGGTGAAGCCTGGGGCCTCAGTGAAGATGTCCTGCAAGGCTTCTGG |
| | | | | ACACACTTTCACTGACTGTGTTATAATCTGGGTGAAACAGAGAGCTGGACAGGGCCTTGAGTGGA |
| | | | | TTGGACAGATTTATCCAGGGACTGGTCGTTCTTACTACAATGAGATTTTCAAGGGCAAGGCCACA |
| | | | | CTGACTGCAGACAAATCCTCCAACACAGTCCACATTCAACTCAGCAGCCTGACATCTGAGGACTC |
| | | | | TGCGGTCTATTTCTGTGCCCTATCTACTCTTATTCACGGGACCTGGTTTTCTTATTGGGGCCAAG |
| | | | | GGACTCTGGTCACTGTCTCTTCCGGAGGTGGTGGCTCCGAGGTGCAGCTGCTCGAGTCTGGAGGA |
| | | | | GGATTGGTGCAGCCTGGAGGGTCATTGAAACTCTCATGTGCAGCCTCTGGATTCACCTTCAATGT |
| | | | | GTACGCCATGAACTGGGTCCGCCAGGCTCCAGGAAAGGGTTTGGAATGGGTTGCTCGCATAAGAA |
| | | | | GTAAATATAATAATTATGCAACATATTATGCCGATTCAGTGAAAAAGAGGTTCACCATCTCCAGA |
| | | | | GATGATTCAAAAAACACTGCCTATCTACAAATGAACAACTTGAAAACTGAGGACACTGCCGTGTA |
| | | | | CTACTGTGTGAGACATGGGAACTTCGGTAATAGCTACATATCCTGGTGGGCTTACTGGGGCCAAG |
| | | | | GGACTCTGGTCACCGTCTCCTCAGGTGGTGGTGGTTCTGGCGGCGGCGGCTCCGGTGGTGGTGGT |
| | | | | TCTGAGCTCGTTGTGACTCAGGAACCTTCACTCACCGTATCACCTGGTGGAACAGTCACACTCAC |
| | | | | TTGTGGCTCCTCGACTGGGGCTGTTACATCTGGCTACTACCCAAACTGGGTCCAACAAAAACCAG |
| | | | | GTCAGGCACCCCGTGGTCTAATAGGTGGGACTAAGTTCCTCGCCCCCGGTACTCCTGCCAGATTC |
| | | | | TCAGGCTCCCTGCTTGGAGGCAAGGCTGCCCTCACCCTCTCAGGGGTACAGCCAGAGGATGAGGC |
| | | | | AGAATATTACTGTGCTCTATGGTACAGCAACCGCTGGGTGTTCGGTGGAGGAACCAAACTGACTG |
| | | | | TCCTA |
| 309 | MCSP-G4 VH-VL × | artificial | aa | QVQLVQSGAEVKRPGASMKVSCKASGYTFTNYYIHWVRQAPGQGLEWMGWINPNSGATNYAQKFQ |
| | H2C VH-VL | | | GRVTMTRDTSTSTVYMELSSLRSEDTAVYYCAKSWVSWFASWGQGTLVTVSSGGGGSGGGGSGGG |
| | | | | GSDIVMTQSPDSLAVSLGERATINCKSSQSVLNSSNNRNYLAWYQQKPGQPPKLLIYWASTRESG |
| | | | | VPDRFSGSGSGTDFTLTISGLQAEDVAVYYCQQHYSTPFTFGPGTKVDIKSGGGGSEVQLVESGG |
| | | | | GLVQPGGSLKLSCAASGFTFNKYAMNWVRQAPGKGLEWVARIRSKYNNYATYYADSVKDRFTISR |
| | | | | DDSKNTAYLQMNNLKTEDTAVYYCVRHGNFGNSYISYWAYWGQGTLVTVSSGGGGSGGGGSGGGG |
| | | | | SQTVVTQEPSLTVSPGGTVTLTCGSSTGAVTSGYYPNWVQQKPGQAPRGLIGGTKFLAPGTPARF |
| | | | | SGSLLGGKAALTLSGVQPEDEAEYYCALWYSNRWVFGGGTKLTVL |
| 310 | MCSP-G4 VH-VL × | artificial | nt | CAGGTGCAGCTGGTCCAGTCTGGGGCTGAGGTGAAGAGGCCTGGGGCCTCAATGAAGGTCTCCTG |
| | H2C VH-VL | | | CAAGGCTTCTGGGTACACCTTCACCAACTACTATATACACTGGGTGCGACAGGCCCCTGGACAAG |
| | | | | GTCTTGAGTGGATGGGTTGGATCAACCCTAACAGTGGTGCCACAAACTATGCACAGAAGTTCCAG |
| | | | | GGCAGAGTCACCATGACCAGGGACACGTCCACGAGCACAGTCTACATGGAGCTGAGCAGCCTGAG |
| | | | | ATCTGAGGACACGGCCGTGTATTACTGTGCGAAATCCTGGGTCTCCTGGTTTGCTTCCTGGGGTC |
| | | | | AAGGAACCTTGGTCACCGTCTCCTCAGGTGGTGGTGGTTCTGGCGGCGGCGGCTCCGGTGGTGGT |
| | | | | GGTTCTGATATCGTGATGACCCAGTCTCCAGACTCCCTGGCTGTGTCTCTGGGCGAGAGGGCCAC |
| | | | | CATCAACTGCAAGTCCAGCCAGAGTGTTTTAAACAGCTCCAACAATAGGAACTACTTAGCTTGGT |
| | | | | ACCAGCAGAAACCAGGACAGCCTCCTAAGCTGCTCATTTACTGGGCATCTACCCGGGAATCCGGG |
| | | | | GTCCCTGACCGATTCAGTGGCAGCGGGTCTGGGACAGATTTCACTCTCACCATCAGTGGCCTGCA |
| | | | | GGCTGAAGATGTGGCAGTTTATTACTGTCAGCAACATTATAGTACTCCATTCACTTTTGGCCCTG |
| | | | | GGACCAAAGTGGATATCAAATCCGGAGGTGGTGGATCCGAGGTGCAGCTGGTCGAGTCTGGAGGA |
| | | | | GGATTGGTGCAGCCTGGAGGGTCATTGAAACTCTCATGTGCAGCCTCTGGATTCACCTTCAATAA |
| | | | | GTACGCCATGAACTGGGTCCGCCAGGCTCCAGGAAAGGGTTTGGAATGGGTTGCTCGCATAAGAA |
| | | | | GTAAATATAATAATTATGCAACATATTATGCCGATTCAGTGAAAGACAGGTTCACCATCTCCAGA |
| | | | | GATGATTCAAAAAACACTGCCTATCTACAAATGAACAACTTGAAAACTGAGGACACTGCCGTGTA |
| | | | | CTACTGTGTGAGACATGGGAACTTCGGTAATAGCTACATATCCTACTGGGCTTACTGGGGCCAAG |
| | | | | GGACTCTGGTCACCGTCTCCTCAGGTGGTGGTGGTTCTGGCGGCGGCGGCTCCGGTGGTGGTGGT |
| | | | | TCTCAGACTGTTGTGACTCAGGAACCTTCACTCACCGTATCACCTGGTGGAACAGTCACACTCAC |
| | | | | TTGTGGCTCCTCGACTGGGGCTGTTACATCTGGCTACTACCCAAACTGGGTCCAACAAAAACCAG |
| | | | | GTCAGGCACCCCGTGGTCTAATAGGTGGGACTAAGTTCCTCGCCCCCGGTACTCCTGCCAGATTC |
| | | | | TCAGGCTCCCTGCTTGGAGGCAAGGCTGCCCTCACCCTCTCAGGGGTACAGCCAGAGGATGAGGC |
| | | | | AGAATATTACTGTGCTCTATGGTACAGCAACCGCTGGGTGTTCGGTGGAGGAACCAAACTGACTG |
| | | | | TCCTA |
| 311 | MCSP-G4 VH-VL × | artificial | aa | QVQLVQSGAEVKRPGASMKVSCKASGYTFTNYYIHWVRQAPGQGLEWMGWINPNSGATNYAQKFQ |
| | F12Q VH-VL | | | GRVTMTRDTSTSTVYMELSSLRSEDTAVYYCAKSWVSWFASWGQGTLVTVSSGGGGSGGGGSGGG |
| | | | | GSDIVMTQSPDSLAVSLGERATINCKSSQSVLNSSNNRNYLAWYQQKPGQPPKLLIYWASTRESG |
| | | | | VPDRFSGSGSGTDFTLTISGLQAEDVAVYYCQQHYSTPFTFGPGTKVDIKSGGGGSEVQLVESGG |
| | | | | GLVQPGGSLKLSCAASGFTFNSYAMNWVRQAPGKGLEWVARIRSKYNNYATYYADSVKGRFTISR |
| | | | | DDSKNTAYLQMNNLKTEDTAVYYCVRHGNFGNSYVSWWAYWGQGTLVTVSSGGGGSGGGGSGGGG |
| | | | | SQTVVTQEPSLTVSPGGTVTLTCGSSTGAVTSGNYPNWVQQKPGQAPRGLIGGTKFLAPGTPARF |
| | | | | SGSLLGGKAALTLSGVQPEDEAEYYCVLWYSNRWVFGGGTKLTVL |
| 312 | MCSP-G4 VH-VL × | artificial | nt | CAGGTGCAGCTGGTCCAGTCTGGGGCTGAGGTGAAGAGGCCTGGGGCCTCAATGAAGGTCTCCTG |
| | F12Q VH-VL | | | CAAGGCTTCTGGGTACACCTTCACCAACTACTATATACACTGGGTGCGACAGGCCCCTGGACAAG |
| | | | | GTCTTGAGTGGATGGGTTGGATCAACCCTAACAGTGGTGCCACAAACTATGCACAGAAGTTCCAG |
| | | | | GGCAGAGTCACCATGACCAGGGACACGTCCACGAGCACAGTCTACATGGAGCTGAGCAGCCTGAG |
| | | | | ATCTGAGGACACGGCCGTGTATTACTGTGCGAAATCCTGGGTCTCCTGGTTTGCTTCCTGGGGTC |
| | | | | AAGGAACCTTGGTCACCGTCTCCTCAGGTGGTGGTGGTTCTGGCGGCGGCGGCTCCGGTGGTGGT |
| | | | | GGTTCTGATATCGTGATGACCCAGTCTCCAGACTCCCTGGCTGTGTCTCTGGGCGAGAGGGCCAC |
| | | | | CATCAACTGCAAGTCCAGCCAGAGTGTTTTAAACAGCTCCAACAATAGGAACTACTTAGCTTGGT |
| | | | | ACCAGCAGAAACCAGGACAGCCTCCTAAGCTGCTCATTTACTGGGCATCTACCCGGGAATCCGGG |
| | | | | GTCCCTGACCGATTCAGTGGCAGCGGGTCTGGGACAGATTTCACTCTCACCATCAGTGGCCTGCA |
| | | | | GGCTGAAGATGTGGCAGTTTATTACTGTCAGCAACATTATAGTACTCCATTCACTTTTGGCCCTG |
| | | | | GGACCAAAGTGGATATCAAATCCGGAGGTGGTGGATCCGAGGTGCAGCTGGTCGAGTCTGGAGGA |
| | | | | GGATTGGTGCAGCCTGGAGGGTCATTGAAACTCTCATGTGCAGCCTCTGGATTCACCTTCAATAG |
| | | | | CTACGCCATGAACTGGGTCCGCCAGGCTCCAGGAAAGGGTTTGGAATGGGTTGCTCGCATAAGAA |
| | | | | GTAAATATAATAATTATGCAACATATTATGCCGATTCAGTGAAAGGCAGGTTCACCATCTCCAGA |
| | | | | GATGATTCAAAAAACACTGCCTATCTACAAATGAACAACTTGAAAACTGAGGACACTGCCGTGTA |
| | | | | CTACTGTGTGAGACATGGGAACTTCGGTAATAGCTACGTTTCCTGGTGGGCTTACTGGGGCCAAG |
| | | | | GGACTCTGGTCACCGTCTCCTCAGGTGGTGGTGGTTCTGGCGGCGGCGGCTCCGGTGGTGGTGGT |
| | | | | TCTCAGACTGTTGTGACTCAGGAACCTTCACTCACCGTATCACCTGGTGGAACAGTCACACTCAC |
| | | | | TTGTGGCTCCTCGACTGGGGCTGTTACATCTGGCAACTACCCAAACTGGGTCCAACAAAAACCAG |
| | | | | GTCAGGCACCCCGTGGTCTAATAGGTGGGACTAAGTTCCTCGCCCCCGGTACTCCTGCCAGATTC |
| | | | | TCAGGCTCCCTGCTTGGAGGCAAGGCTGCCCTCACCCTCTCAGGGGTACAGCCAGAGGATGAGGC |
| | | | | AGAATATTACTGTGTTCTATGGTACAGCAACCGCTGGGTGTTCGGTGGAGGAACCAAACTGACTG |
| | | | | TCCTA |
| 313 | MCSP-G4 VH-VL × | artificial | aa | QVQLVQSGAEVKRPGASMKVSCKASGYTFTNYYIHWVRQAPGQGLEWMGWINPNSGATNYAQKFQ |
| | I2C VH-VL | | | GRVTMTRDTSTSTVYMELSSLRSEDTAVYYCAKSWVSWFASWGQGTLVTVSSGGGGSGGGGSGGG |
| | | | | GSDIVMTQSPDSLAVSLGERATINCKSSQSVLNSSNNRNYLAWYQQKPGQPPKLLIYWASTRESG |
| | | | | VPDRFSGSGSGTDFTLTISGLQAEDVAVYYCQQHYSTPFTFGPGTKVDIKSGGGGSEVQLVESGG |
| | | | | GLVQPGGSLKLSCAASGFTFNKYAMNWVRQAPGKGLEWVARIRSKYNNYATYYADSVKDRFTISR |
| | | | | DDSKNTAYLQMNNLKTEDTAVYYCVRHGNFGNSYISYWAYWGQGTLVTVSSGGGGSGGGGSGGGG |
| | | | | SQTVVTQEPSLTVSPGGTVTLTCGSSTGAVTSGNYPNWVQQKPGQAPRGLIGGTKFLAPGTPARF |
| | | | | SGSLLGGKAALTLSGVQPEDEAEYYCVLWYSNRWVFGGGTKLTVL |
| 314 | MCSP-G4 VH-VL × | artificial | nt | CAGGTGCAGCTGGTCCAGTCTGGGGCTGAGGTGAAGAGGCCTGGGGCCTCAATGAAGGTCTCCTG |
| | I2C VH-VL | | | CAAGGCTTCTGGGTACACCTTCACCAACTACTATATACACTGGGTGCGACAGGCCCCTGGACAAG |
| | | | | GTCTTGAGTGGATGGGTTGGATCAACCCTAACAGTGGTGCCACAAACTATGCACAGAAGTTCCAG |
| | | | | GGCAGAGTCACCATGACCAGGGACACGTCCACGAGCACAGTCTACATGGAGCTGAGCAGCCTGAG |
| | | | | ATCTGAGGACACGGCCGTGTATTACTGTGCGAAATCCTGGGTCTCCTGGTTTGCTTCCTGGGGTC |
| | | | | AAGGAACCTTGGTCACCGTCTCCTCAGGTGGTGGTGGTTCTGGCGGCGGCGGCTCCGGTGGTGGT |
| | | | | GGTTCTGATATCGTGATGACCCAGTCTCCAGACTCCCTGGCTGTGTCTCTGGGCGAGAGGGCCAC |
| | | | | CATCAACTGCAAGTCCAGCCAGAGTGTTTTAAACAGCTCCAACAATAGGAACTACTTAGCTTGGT |
| | | | | ACCAGCAGAAACCAGGACAGCCTCCTAAGCTGCTCATTTACTGGGCATCTACCCGGGAATCCGGG |
| | | | | GTCCCTGACCGATTCAGTGGCAGCGGGTCTGGGACAGATTTCACTCTCACCATCAGTGGCCTGCA |
| | | | | GGCTGAAGATGTGGCAGTTTATTACTGTCAGCAACATTATAGTACTCCATTCACTTTTGGCCCTG |
| | | | | GGACCAAAGTGGATATCAAATCCGGAGGTGGTGGATCCGAGGTGCAGCTGGTCGAGTCTGGAGGA |
| | | | | GGATTGGTGCAGCCTGGAGGGTCATTGAAACTCTCATGTGCAGCCTCTGGATTCACCTTCAATAA |
| | | | | GTACGCCATGAACTGGGTCCGCCAGGCTCCAGGAAAGGGTTTGGAATGGGTTGCTCGCATAAGAA |
| | | | | GTAAATATAATAATTATGCAACATATTATGCCGATTCAGTGAAAGACAGGTTCACCATCTCCAGA |
| | | | | GATGATTCAAAAAACACTGCCTATCTACAAATGAACAACTTGAAAACTGAGGACACTGCCGTGTA |
| | | | | CTACTGTGTGAGACATGGGAACTTCGGTAATAGCTACATATCCTACTGGGCTTACTGGGGCCAAG |
| | | | | GGACTCTGGTCACCGTCTCCTCAGGTGGTGGTGGTTCTGGCGGCGGCGGCTCCGGTGGTGGTGGT |
| | | | | TCTCAGACTGTTGTGACTCAGGAACCTTCACTCACCGTATCACCTGGTGGAACAGTCACACTCAC |
| | | | | TTGTGGCTCCTCGACTGGGGCTGTTACATCTGGCAACTACCCAAACTGGGTCCAACAAAAACCAG |
| | | | | GTCAGGCACCCCGTGGTCTAATAGGTGGGACTAAGTTCCTCGCCCCCGGTACTCCTGCCAGATTC |
| | | | | TCAGGCTCCCTGCTTGGAGGCAAGGCTGCCCTCACCCTCTCAGGGGTACAGCCAGAGGATGAGGC |
| | | | | AGAATATTACTGTGTTCTATGGTACAGCAACCGCTGGGTGTTCGGTGGAGGAACCAAACTGACTG |
| | | | | TCCTA |
| 315 | MCSP-G4 VH- | artificial | aa | QVQLVQSGAEVKRPGASMKVSCKASGYTFTNYYIHWVRQAPGQGLEWMGWINPNSGATNYAQKFQ |
| | VL-P × F6A VH- | | | GRVTMTRDTSTSTVYMELSSLRSEDTAVYYCAKSWVSWFASWGQGTLVTVSSGGGGSGGGGSGGG |
| | VL-P | | | GSELVMTQSPDSLAVSLGERATINCKSSQSVLNSSNNRNYLAWYQQKPGQPPKLLIYWASTRESG |
| | | | | VPDRFSGSGSGTDFTLTISGLQAEDVAVYYCQQHYSTPFTFGPGTKVDIKSGGGGSEVQLLESGG |
| | | | | GLVQPGGSLKLSCAASGFTFNIYAMNWVRQAPGKGLEWVARIRSKYNNYATYYADSVKSRFTISR |
| | | | | DDSKNTAYLQMNNLKTEDTAVYYCVRHGNFGNSYVSFFAYWGQGTLVTVSSGGGGSGGGGSGGGG |
| | | | | SELVVTQEPSLTVSPGGTVTLTCGSSTGAVTSGYYPNWVQQKPGQAPRGLIGGTKFLAPGTPARF |
| | | | | SGSLLGGKAALTLSGVQPEDEAEYYCALWYSNRWVFGGGTKLTVL |
| 316 | MCSP-G4 VH- | artificial | nt | CAGGTGCAGCTGGTCCAGTCTGGGGCTGAGGTGAAGAGGCCTGGGGCCTCAATGAAGGTCTCCTG |
| | VL-P × F6A VH- | | | CAAGGCTTCTGGGTACACCTTCACCAACTACTATATACACTGGGTGCGACAGGCCCCTGGACAAG |
| | VL-P | | | GTCTTGAGTGGATGGGTTGGATCAACCCTAACAGTGGTGCCACAAACTATGCACAGAAGTTCCAG |
| | | | | GGCAGAGTCACCATGACCAGGGACACGTCCACGAGCACAGTCTACATGGAGCTGAGCAGCCTGAG |
| | | | | ATCTGAGGACACGGCCGTGTATTACTGTGCGAAATCCTGGGTCTCCTGGTTTGCTTCCTGGGGTC |
| | | | | AAGGAACCTTGGTCACCGTCTCCTCAGGTGGTGGTGGTTCTGGCGGCGGCGGCTCCGGTGGTGGT |
| | | | | GGTTCTGAGCTCGTGATGACCCAGTCTCCAGACTCCCTGGCTGTGTCTCTGGGCGAGAGGGCCAC |
| | | | | CATCAACTGCAAGTCCAGCCAGAGTGTTTTAAACAGCTCCAACAATAGGAACTACTTAGCTTGGT |
| | | | | ACCAGCAGAAACCAGGACAGCCTCCTAAGCTGCTCATTTACTGGGCATCTACCCGGGAATCCGGG |
| | | | | GTCCCTGACCGATTCAGTGGCAGCGGGTCTGGGACAGATTTCACTCTCACCATCAGTGGCCTGCA |
| | | | | GGCTGAAGATGTGGCAGTTTATTACTGTCAGCAACATTATAGTACTCCATTCACTTTTGGCCCTG |
| | | | | GGACCAAAGTGGATATCAAATCCGGAGGTGGTGGATCCGAGGTGCAGCTGCTCGAGTCTGGAGGA |
| | | | | GGATTGGTGCAGCCTGGAGGGTCATTGAAACTCTCATGTGCAGCCTCTGGATTCACCTTCAATAT |
| | | | | CTACGCCATGAACTGGGTCCGCCAGGCTCCAGGAAAGGGTTTGGAATGGGTTGCTCGCATAAGAA |
| | | | | GTAAATATAATAATTATGCAACATATTATGCCGATTCAGTGAAAAGCAGGTTCACCATCTCCAGA |
| | | | | GATGATTCAAAAAACACTGCCTATCTACAAATGAACAACTTGAAAACTGAGGACACTGCCGTGTA |
| | | | | CTACTGTGTGAGACATGGGAACTTCGGTAATAGCTACGTATCCTTCTTCGCTTACTGGGGCCAAG |
| | | | | GGACTCTGGTCACCGTCTCCTCAGGTGGTGGTGGTTCTGGCGGCGGCGGCTCCGGTGGTGGTGGT |
| | | | | TCTGAGCTCGTTGTGACTCAGGAACCTTCACTCACCGTATCACCTGGTGGAACAGTCACACTCAC |
| | | | | TTGTGGCTCCTCGACTGGGGCTGTTACATCTGGCTACTACCCAAACTGGGTCCAACAAAAACCAG |
| | | | | GTCAGGCACCCCGTGGTCTAATAGGTGGGACTAAGTTCCTCGCCCCCGGTACTCCTGCCAGATTC |
| | | | | TCAGGCTCCCTGCTTGGAGGCAAGGCTGCCCTCACCCTCTCAGGGGTACAGCCAGAGGATGAGGC |
| | | | | AGAATATTACTGTGCTCTATGGTACAGCAACCGCTGGGTGTTCGGTGGAGGAACCAAACTGACTG |
| | | | | TCCTA |
| 317 | MCSP-G4 VH- | artificial | aa | QVQLVQSGAEVKRPGASMKVSCKASGYTFTNYYIHWVRQAPGQGLEWMGWINPNSGATNYAQKFQ |
| | VL-P × H2C VH- | | | GRVTMTRDTSTSTVYMELSSLRSEDTAVYYCAKSWVSWFASWGQGTLVTVSSGGGGSGGGGSGGG |
| | VL-P | | | GSELVMTQSPDSLAVSLGERATINCKSSQSVLNSSNNRNYLAWYQQKPGQPPKLLIYWASTRESG |
| | | | | VPDRFSGSGSGTDFTLTISGLQAEDVAVYYCQQHYSTPFTFGPGTKVDIKSGGGGSEVQLLESGG |
| | | | | GLVQPGGSLKLSCAASGFTFNKYAMNWVRQAPGKGLEWVARIRSKYNNYATYYADSVKDRFTISR |
| | | | | DDSKNTAYLQMNNLKTEDTAVYYCVRHGNFGNSYISYWAYWGQGTLVTVSSGGGGSGGGGSGGGG |
| | | | | SELVVTQEPSLTVSPGGTVTLTCGSSTGAVTSGYYPNWVQQKPGQAPRGLIGGTKFLAPGTPARF |
| | | | | SGSLLGGKAALTLSGVQPEDEAEYYCALWYSNRWVFGGGTKLTVL |
| 318 | MCSP-G4 VH- | artificial | nt | CAGGTGCAGCTGGTCCAGTCTGGGGCTGAGGTGAAGAGGCCTGGGGCCTCAATGAAGGTCTCCTG |
| | VL-P × H2C VH- | | | CAAGGCTTCTGGGTACACCTTCACCAACTACTATATACACTGGGTGCGACAGGCCCCTGGACAAG |
| | VL-P | | | GTCTTGAGTGGATGGGTTGGATCAACCCTAACAGTGGTGCCACAAACTATGCACAGAAGTTCCAG |
| | | | | GGCAGAGTCACCATGACCAGGGACACGTCCACGAGCACAGTCTACATGGAGCTGAGCAGCCTGAG |
| | | | | ATCTGAGGACACGGCCGTGTATTACTGTGCGAAATCCTGGGTCTCCTGGTTTGCTTCCTGGGGTC |
| | | | | AAGGAACCTTGGTCACCGTCTCCTCAGGTGGTGGTGGTTCTGGCGGCGGCGGCTCCGGTGGTGGT |
| | | | | GGTTCTGAGCTCGTGATGACCCAGTCTCCAGACTCCCTGGCTGTGTCTCTGGGCGAGAGGGCCAC |
| | | | | CATCAACTGCAAGTCCAGCCAGAGTGTTTTAAACAGCTCCAACAATAGGAACTACTTAGCTTGGT |
| | | | | ACCAGCAGAAACCAGGACAGCCTCCTAAGCTGCTCATTTACTGGGCATCTACCCGGGAATCCGGG |
| | | | | GTCCCTGACCGATTCAGTGGCAGCGGGTCTGGGACAGATTTCACTCTCACCATCAGTGGCCTGCA |
| | | | | GGCTGAAGATGTGGCAGTTTATTACTGTCAGCAACATTATAGTACTCCATTCACTTTTGGCCCTG |
| | | | | GGACCAAAGTGGATATCAAATCCGGAGGTGGTGGATCCGAGGTGCAGCTGCTCGAGTCTGGAGGA |
| | | | | GGATTGGTGCAGCCTGGAGGGTCATTGAAACTCTCATGTGCAGCCTCTGGATTCACCTTCAATAA |
| | | | | GTACGCCATGAACTGGGTCCGCCAGGCTCCAGGAAAGGGTTTGGAATGGGTTGCTCGCATAAGAA |
| | | | | GTAAATATAATAATTATGCAACATATTATGCCGATTCAGTGAAAGACAGGTTCACCATCTCCAGA |
| | | | | GATGATTCAAAAAACACTGCCTATCTACAAATGAACAACTTGAAAACTGAGGACACTGCCGTGTA |
| | | | | CTACTGTGTGAGACATGGGAACTTCGGTAATAGCTACATATCCTACTGGGCTTACTGGGGCCAAG |
| | | | | GGACTCTGGTCACCGTCTCCTCAGGTGGTGGTGGTTCTGGCGGCGGCGGCTCCGGTGGTGGTGGT |
| | | | | TCTGAGCTCGTTGTGACTCAGGAACCTTCACTCACCGTATCACCTGGTGGAACAGTCACACTCAC |
| | | | | TTGTGGCTCCTCGACTGGGGCTGTTACATCTGGCTACTACCCAAACTGGGTCCAACAAAAACCAG |
| | | | | GTCAGGCACCCCGTGGTCTAATAGGTGGGACTAAGTTCCTCGCCCCCGGTACTCCTGCCAGATTC |
| | | | | TCAGGCTCCCTGCTTGGAGGCAAGGCTGCCCTCACCCTCTCAGGGGTACAGCCAGAGGATGAGGC |
| | | | | AGAATATTACTGTGCTCTATGGTACAGCAACCGCTGGGTGTTCGGTGGAGGAACCAAACTGACTG |
| | | | | TCCTA |
| 319 | MCSP-G4 VH- | artificial | aa | QVQLVQSGAEVKRPGASMKVSCKASGYTFTNYYIHWVRQAPGQGLEWMGWINPNSGATNYAQKFQ |
| | VL-P × H1E VH- | | | GRVTMTRDTSTSTVYMELSSLRSEDTAVYYCAKSWVSWFASWGQGTLVTVSSGGGGSGGGGSGGG |
| | VL-P | | | GSELVMTQSPDSLAVSLGERATINCKSSQSVLNSSNNRNYLAWYQQKPGQPPKLLIYWASTRESG |
| | | | | VPDRFSGSGSGTDFTLTISGLQAEDVAVYYCQQHYSTPFTFGPGTKVDIKSGGGGSEVQLLESGG |
| | | | | GLEQPGGSLKLSCAASGFTFNSYAMNWVRQAPGKGLEWVARIRSKYNNYATYYADSVKGRFTISR |
| | | | | DDSKNTAYLQMNNLKTEDTAVYYCVRHGNFGNSYLSFWAYWGQGTLVTVSSGGGGSGGGGSGGGG |
| | | | | SELVVTQEPSLTVSPGGTVTLTCGSSTGAVTSGYYPNWVQQKPGQAPRGLIGGTKFLAPGTPARF |
| | | | | SGSLLGGKAALTLSGVQPEDEAEYYCALWYSNRWVFGGGTKLTVL |
| 320 | MCSP-G4 VH- | artificial | nt | CAGGTGCAGCTGGTCCAGTCTGGGGCTGAGGTGAAGAGGCCTGGGGCCTCAATGAAGGTCTCCTG |
| | VL-P × H1E VH- | | | CAAGGCTTCTGGGTACACCTTCACCAACTACTATATACACTGGGTGCGACAGGCCCCTGGACAAG |
| | VL-P | | | GTCTTGAGTGGATGGGTTGGATCAACCCTAACAGTGGTGCCACAAACTATGCACAGAAGTTCCAG |
| | | | | GGCAGAGTCACCATGACCAGGGACACGTCCACGAGCACAGTCTACATGGAGCTGAGCAGCCTGAG |
| | | | | ATCTGAGGACACGGCCGTGTATTACTGTGCGAAATCCTGGGTCTCCTGGTTTGCTTCCTGGGGTC |
| | | | | AAGGAACCTTGGTCACCGTCTCCTCAGGTGGTGGTGGTTCTGGCGGCGGCGGCTCCGGTGGTGGT |
| | | | | GGTTCTGAGCTCGTGATGACCCAGTCTCCAGACTCCCTGGCTGTGTCTCTGGGCGAGAGGGCCAC |
| | | | | CATCAACTGCAAGTCCAGCCAGAGTGTTTTAAACAGCTCCAACAATAGGAACTACTTAGCTTGGT |
| | | | | ACCAGCAGAAACCAGGACAGCCTCCTAAGCTGCTCATTTACTGGGCATCTACCCGGGAATCCGGG |
| | | | | GTCCCTGACCGATTCAGTGGCAGCGGGTCTGGGACAGATTTCACTCTCACCATCAGTGGCCTGCA |
| | | | | GGCTGAAGATGTGGCAGTTTATTACTGTCAGCAACATTATAGTACTCCATTCACTTTTGGCCCTG |
| | | | | GGACCAAAGTGGATATCAAATCCGGAGGTGGTGGATCCGAGGTGCAGCTGCTCGAGTCTGGAGGA |
| | | | | GGATTGGAGCAGCCTGGAGGGTCATTGAAACTCTCATGTGCAGCCTCTGGATTCACCTTCAATTC |
| | | | | GTACGCCATGAACTGGGTCCGCCAGGCTCCAGGAAAGGGTTTGGAATGGGTTGCTCGCATAAGAA |
| | | | | GTAAATATAATAATTATGCAACATATTATGCCGATTCAGTGAAAGGGAGGTTCACCATCTCCAGA |
| | | | | GATGATTCAAAAAACACTGCCTATCTACAAATGAACAACTTGAAAACTGAGGACACTGCCGTGTA |
| | | | | CTACTGTGTGAGACATGGGAACTTCGGTAATAGCTACCTATCCTTCTGGGCTTACTGGGGCCAAG |
| | | | | GGACTCTGGTCACCGTCTCCTCAGGTGGTGGTGGTTCTGGCGGCGGCGGCTCCGGTGGTGGTGGT |
| | | | | TCTGAGCTCGTTGTGACTCAGGAACCTTCACTCACCGTATCACCTGGTGGAACAGTCACACTCAC |
| | | | | TTGTGGCTCCTCGACTGGGGCTGTTACATCTGGCTACTACCCAAACTGGGTCCAACAAAAACCAG |
| | | | | GTCAGGCACCCCGTGGTCTAATAGGTGGGACTAAGTTCCTCGCCCCCGGTACTCCTGCCAGATTC |
| | | | | TCAGGCTCCCTGCTTGGAGGCAAGGCTGCCCTCACCCTCTCAGGGGTACAGCCAGAGGATGAGGC |
| | | | | AGAATATTACTGTGCTCTATGGTACAGCAACCGCTGGGTGTTCGGTGGAGGAACCAAACTGACTG |
| | | | | TCCTA |
| 321 | MCSP-G4 VH- | artificial | aa | QVQLVQSGAEVKRPGASMKVSCKASGYTFTNYYIHWVRQAPGQGLEWMGWINPNSGATNYAQKFQ |
| | VL-P × G4H VH- | | | GRVTMTRDTSTSTVYMELSSLRSEDTAVYYCAKSWVSWFASWGQGTLVTVSSGGGGSGGGGSGGG |
| | VL-P | | | GSELVMTQSPDSLAVSLGERATINCKSSQSVLNSSNNRNYLAWYQQKPGQPPKLLIYWASTRESG |
| | | | | VPDRFSGSGSGTDFTLTISGLQAEDVAVYYCQQHYSTPFTFGPGTKVDIKSGGGGSEVQLLESGG |
| | | | | GLVQPGGSLKLSCAASGFTFNRYAMNWVRQAPGKGLEWVARIRSKYNNYATYYADSVKGRFTISR |
| | | | | DDSKNTAYLQMNNLKTEDTAVYYCVRHGNFGNSYLSYFAYWGQGTLVTVSSGGGGSGGGGSGGGG |
| | | | | SELVVTQEPSLTVSPGGTVTLTCGSSTGAVTSGYYPNWVQQKPGQAPRGLIGGTKFLAPGTPARF |
| | | | | SGSLLGGKAALTLSGVQPEDEAEYYCALWYSNRWVFGGGTKLTVL |
| 322 | MCSP-G4 VH- | artificial | nt | CAGGTGCAGCTGGTCCAGTCTGGGGCTGAGGTGAAGAGGCCTGGGGCCTCAATGAAGGTCTCCTG |
| | VL-P × G4H VH- | | | CAAGGCTTCTGGGTACACCTTCACCAACTACTATATACACTGGGTGCGACAGGCCCCTGGACAAG |
| | VL-P | | | GTCTTGAGTGGATGGGTTGGATCAACCCTAACAGTGGTGCCACAAACTATGCACAGAAGTTCCAG |
| | | | | GGCAGAGTCACCATGACCAGGGACACGTCCACGAGCACAGTCTACATGGAGCTGAGCAGCCTGAG |
| | | | | ATCTGAGGACACGGCCGTGTATTACTGTGCGAAATCCTGGGTCTCCTGGTTTGCTTCCTGGGGTC |
| | | | | AAGGAACCTTGGTCACCGTCTCCTCAGGTGGTGGTGGTTCTGGCGGCGGCGGCTCCGGTGGTGGT |
| | | | | GGTTCTGAGCTCGTGATGACCCAGTCTCCAGACTCCCTGGCTGTGTCTCTGGGCGAGAGGGCCAC |
| | | | | CATCAACTGCAAGTCCAGCCAGAGTGTTTTAAACAGCTCCAACAATAGGAACTACTTAGCTTGGT |
| | | | | ACCAGCAGAAACCAGGACAGCCTCCTAAGCTGCTCATTTACTGGGCATCTACCCGGGAATCCGGG |
| | | | | GTCCCTGACCGATTCAGTGGCAGCGGGTCTGGGACAGATTTCACTCTCACCATCAGTGGCCTGCA |
| | | | | GGCTGAAGATGTGGCAGTTTATTACTGTCAGCAACATTATAGTACTCCATTCACTTTTGGCCCTG |
| | | | | GGACCAAAGTGGATATCAAATCCGGAGGTGGTGGATCCGAGGTGCAGCTGCTCGAGTCTGGAGGA |
| | | | | GGATTGGTGCAGCCTGGAGGGTCATTGAAACTCTCATGTGCAGCCTCTGGATTCACCTTCAATCG |
| | | | | CTACGCCATGAACTGGGTCCGCCAGGCTCCAGGAAAGGGTTTGGAATGGGTTGCTCGCATAAGAA |
| | | | | GTAAATATAATAATTATGCAACATATTATGCCGATTCAGTGAAAGGGAGGTTCACCATCTCCAGA |
| | | | | GATGATTCAAAAAACACTGCCTATCTACAAATGAACAACTTGAAAACTGAGGACACTGCCGTGTA |
| | | | | CTACTGTGTGAGACATGGGAACTTCGGTAATAGCTACTTATCCTACTTCGCTTACTGGGGCCAAG |
| | | | | GGACTCTGGTCACCGTCTCCTCAGGTGGTGGTGGTTCTGGCGGCGGCGGCTCCGGTGGTGGTGGT |
| | | | | TCTGAGCTCGTTGTGACTCAGGAACCTTCACTCACCGTATCACCTGGTGGAACAGTCACACTCAC |
| | | | | TTGTGGCTCCTCGACTGGGGCTGTTACATCTGGCTACTACCCAAACTGGGTCCAACAAAAACCAG |
| | | | | GTCAGGCACCCCGTGGTCTAATAGGTGGGACTAAGTTCCTCGCCCCCGGTACTCCTGCCAGATTC |
| | | | | TCAGGCTCCCTGCTTGGAGGCAAGGCTGCCCTCACCCTCTCAGGGGTACAGCCAGAGGATGAGGC |
| | | | | AGAATATTACTGTGCTCTATGGTACAGCAACCGCTGGGTGTTCGGTGGAGGAACCAAACTGACTG |
| | | | | TCCTA |
| 323 | MCSP-G4 VH- | artificial | aa | QVQLVQSGAEVKRPGASMKVSCKASGYTFTNYYIHWVRQAPGQGLEWMGWINPNSGATNYAQKFQ |
| | VL-P × A2J VH- | | | GRVTMTRDTSTSTVYMELSSLRSEDTAVYYCAKSWVSWFASWGQGTLVTVSSGGGGSGGGGSGGG |
| | VL-P | | | GSELVMTQSPDSLAVSLGERATINCKSSQSVLNSSNNRNYLAWYQQKPGQPPKLLIYWASTRESG |
| | | | | VPDRFSGSGSGTDFTLTISGLQAEDVAVYYCQQHYSTPFTFGPGTKVDIKSGGGGSEVQLLESGG |
| | | | | GLVQPGGSLKLSCAASGFTFNVYAMNWVRQAPGKGLEWVARIRSKYNNYATYYADSVKKRFTISR |
| | | | | DDSKNTAYLQMNNLKTEDTAVYYCVRHGNFGNSYLSWWAYWGQGTLVTVSSGGGGSGGGGSGGGG |
| | | | | SELVVTQEPSLTVSPGGTVTLTCRSSTGAVTSGYYPNWVQQKPGQAPRGLIGATDMRPSGTPARF |
| | | | | SGSLLGGKAALTLSGVQPEDEAEYYCALWYSNRWVFGGGTKLTVL |
| 324 | MCSP-G4 VH- | artificial | nt | CAGGTGCAGCTGGTCCAGTCTGGGGCTGAGGTGAAGAGGCCTGGGGCCTCAATGAAGGTCTCCTG |
| | VL-P × A2J VH- | | | CAAGGCTTCTGGGTACACCTTCACCAACTACTATATACACTGGGTGCGACAGGCCCCTGGACAAG |
| | VL-P | | | GTCTTGAGTGGATGGGTTGGATCAACCCTAACAGTGGTGCCACAAACTATGCACAGAAGTTCCAG |
| | | | | GGCAGAGTCACCATGACCAGGGACACGTCCACGAGCACAGTCTACATGGAGCTGAGCAGCCTGAG |
| | | | | ATCTGAGGACACGGCCGTGTATTACTGTGCGAAATCCTGGGTCTCCTGGTTTGCTTCCTGGGGTC |
| | | | | AAGGAACCTTGGTCACCGTCTCCTCAGGTGGTGGTGGTTCTGGCGGCGGCGGCTCCGGTGGTGGT |
| | | | | GGTTCTGAGCTCGTGATGACCCAGTCTCCAGACTCCCTGGCTGTGTCTCTGGGCGAGAGGGCCAC |
| | | | | CATCAACTGCAAGTCCAGCCAGAGTGTTTTAAACAGCTCCAACAATAGGAACTACTTAGCTTGGT |
| | | | | ACCAGCAGAAACCAGGACAGCCTCCTAAGCTGCTCATTTACTGGGCATCTACCCGGGAATCCGGG |
| | | | | GTCCCTGACCGATTCAGTGGCAGCGGGTCTGGGACAGATTTCACTCTCACCATCAGTGGCCTGCA |
| | | | | GGCTGAAGATGTGGCAGTTTATTACTGTCAGCAACATTATAGTACTCCATTCACTTTTGGCCCTG |
| | | | | GGACCAAAGTGGATATCAAATCCGGAGGTGGTGGATCCGAGGTGCAGCTGCTCGAGTCTGGAGGA |
| | | | | GGATTGGTGCAGCCTGGAGGGTCATTGAAACTCTCATGTGCAGCCTCTGGATTCACCTTCAATGT |
| | | | | CTACGCCATGAACTGGGTCCGCCAGGCTCCAGGAAAGGGTTTGGAATGGGTTGCTCGCATAAGAA |
| | | | | GTAAATATAATAATTATGCAACATATTATGCCGATTCAGTGAAAAAGAGGTTCACCATCTCCAGA |
| | | | | GATGATTCAAAAAACACTGCCTATCTACAAATGAACAACTTGAAAACTGAGGACACTGCCGTGTA |
| | | | | CTACTGTGTGAGACATGGGAACTTCGGTAATAGCTACTTATCCTGGTGGGCTTACTGGGGCCAAG |
| | | | | GGACTCTGGTCACCGTCTCCTCAGGTGGTGGTGGTTCTGGCGGCGGCGGCTCCGGTGGTGGTGGT |
| | | | | TCTGAGCTCGTTGTGACTCAGGAACCTTCACTCACCGTATCACCTGGTGGAACAGTCACACTCAC |
| | | | | TTGTCGCTCCTCGACTGGGGCTGTTACATCTGGCTACTACCCAAACTGGGTCCAACAAAAACCAG |
| | | | | GTCAGGCACCCCGTGGTCTAATAGGTGCCACTGACATGAGGCCCTCTGGTACTCCTGCCAGATTC |
| | | | | TCAGGCTCCCTGCTTGGAGGCAAGGCTGCCCTCACCCTCTCAGGGGTACAGCCAGAGGATGAGGC |
| | | | | AGAATATTACTGTGCTCTATGGTACAGCAACCGCTGGGTGTTCGGTGGAGGAACCAAACTGACTG |
| | | | | TCCTA |
| 325 | MCSP-G4 VH- | artificial | aa | QVQLVQSGAEVKRPGASMKVSCKASGYTFTNYYIHWVRQAPGQGLEWMGWINPNSGATNYAQKFQ |
| | VL-P × E1L VH- | | | GRVTMTRDTSTSTVYMELSSLRSEDTAVYYCAKSWVSWFASWGQGTLVTVSSGGGGSGGGGSGGG |
| | VL-P | | | GSELVMTQSPDSLAVSLGERATINCKSSQSVLNSSNNRNYLAWYQQKPGQPPKLLIYWASTRESG |
| | | | | VPDRFSGSGSGTDFTLTISGLQAEDVAVYYCQQHYSTPFTFGPGTKVDIKSGGGGSEVQLLESGG |
| | | | | GLVQPGGSLKLSCAASGFTFNKYAMNWVRQAPGKGLEWVARIRSKYNNYATYYADSVKSRFTISR |
| | | | | DDSKNTAYLQMNNLKTEDTAVYYCVRHGNFGNSYTSYYAYWGQGTLVTVSSGGGGSGGGGSGGGG |
| | | | | SELVVTQEPSLTVSPGGTVTLTCGSSTGAVTSGYYPNWVQQKPGQAPRGLIGGTKFLAPGTPARF |
| | | | | SGSLLGGKAALTLSGVQPEDEAEYYCALWYSNRWVFGGGTKLTVL |
| 326 | MCSP-G4 VH- | artificial | nt | CAGGTGCAGCTGGTCCAGTCTGGGGCTGAGGTGAAGAGGCCTGGGGCCTCAATGAAGGTCTCCTG |
| | VL-P × E1L VH- | | | CAAGGCTTCTGGGTACACCTTCACCAACTACTATATACACTGGGTGCGACAGGCCCCTGGACAAG |
| | VL-P | | | GTCTTGAGTGGATGGGTTGGATCAACCCTAACAGTGGTGCCACAAACTATGCACAGAAGTTCCAG |
| | | | | GGCAGAGTCACCATGACCAGGGACACGTCCACGAGCACAGTCTACATGGAGCTGAGCAGCCTGAG |
| | | | | ATCTGAGGACACGGCCGTGTATTACTGTGCGAAATCCTGGGTCTCCTGGTTTGCTTCCTGGGGTC |
| | | | | AAGGAACCTTGGTCACCGTCTCCTCAGGTGGTGGTGGTTCTGGCGGCGGCGGCTCCGGTGGTGGT |
| | | | | GGTTCTGAGCTCGTGATGACCCAGTCTCCAGACTCCCTGGCTGTGTCTCTGGGCGAGAGGGCCAC |
| | | | | CATCAACTGCAAGTCCAGCCAGAGTGTTTTAAACAGCTCCAACAATAGGAACTACTTAGCTTGGT |
| | | | | ACCAGCAGAAACCAGGACAGCCTCCTAAGCTGCTCATTTACTGGGCATCTACCCGGGAATCCGGG |
| | | | | GTCCCTGACCGATTCAGTGGCAGCGGGTCTGGGACAGATTTCACTCTCACCATCAGTGGCCTGCA |
| | | | | GGCTGAAGATGTGGCAGTTTATTACTGTCAGCAACATTATAGTACTCCATTCACTTTTGGCCCTG |
| | | | | GGACCAAAGTGGATATCAAATCCGGAGGTGGTGGATCCGAGGTGCAGCTGCTCGAGTCTGGAGGA |
| | | | | GGATTGGTGCAGCCTGGAGGGTCATTGAAACTCTCATGTGCAGCCTCTGGATTCACCTTCAATAA |
| | | | | GTACGCCATGAACTGGGTCCGCCAGGCTCCAGGAAAGGGTTTGGAATGGGTTGCTCGCATAAGAA |
| | | | | GTAAATATAATAATTATGCAACATATTATGCCGATTCAGTGAAATCGAGGTTCACCATCTCCAGA |
| | | | | GATGATTCAAAAAACACTGCCTATCTACAAATGAACAACTTGAAAACTGAGGACACTGCCGTGTA |
| | | | | CTACTGTGTGAGACATGGGAACTTCGGTAATAGCTACACATCCTACTACGCTTACTGGGGCCAAG |
| | | | | GGACTCTGGTCACCGTCTCCTCAGGTGGTGGTGGTTCTGGCGGCGGCGGCTCCGGTGGTGGTGGT |
| | | | | TCTGAGCTCGTTGTGACTCAGGAACCTTCACTCACCGTATCACCTGGTGGAACAGTCACACTCAC |
| | | | | TTGTGGCTCCTCGACTGGGGCTGTTACATCTGGCTACTACCCAAACTGGGTCCAACAAAAACCAG |
| | | | | GTCAGGCACCCCGTGGTCTAATAGGTGGGACTAAGTTCCTCGCCCCCGGTACTCCTGCCAGATTC |
| | | | | TCAGGCTCCCTGCTTGGAGGCAAGGCTGCCCTCACCCTCTCAGGGGTACAGCCAGAGGATGAGGC |
| | | | | AGAATATTACTGTGCTCTATGGTACAGCAACCGCTGGGTGTTCGGTGGAGGAACCAAACTGACTG |
| | | | | TCCTA |
| 327 | MCSP-G4 VH- | artificial | aa | QVQLVQSGAEVKRPGASMKVSCKASGYTFTNYYIHWVRQAPGQGLEWMGWINPNSGATNYAQKFQ |
| | VL-P × E2M VH- | | | GRVTMTRDTSTSTVYMELSSLRSEDTAVYYCAKSWVSWFASWGQGTLVTVSSGGGGSGGGGSGGG |
| | VL-P | | | GSELVMTQSPDSLAVSLGERATINCKSSQSVLNSSNNRNYLAWYQQKPGQPPKLLIYWASTRESG |
| | | | | VPDRFSGSGSGTDFTLTISGLQAEDVAVYYCQQHYSTPFTFGPGTKVDIKSGGGGSEVQLLESGG |
| | | | | GLVQPGGSLKLSCAASGFTFNGYAMNWVRQAPGKGLEWVARIRSKYNNYATYYADSVKERFTISR |
| | | | | DDSKNTAYLQMNNLKTEDTAVYYCVRHRNFGNSYLSWFAYWGQGTLVTVSSGGGGSGGGGSGGGG |
| | | | | SELVVTQEPSLTVSPGGTVTLTCRSSTGAVTSGYYPNWVQQKPGQAPRGLIGATDMRPSGTPARF |
| | | | | SGSLLGGKAALTLSGVQPEDEAEYYCALWYSNRWVFGGGTKLTVL |
| 328 | MCSP-G4 VH- | artificial | nt | CAGGTGCAGCTGGTCCAGTCTGGGGCTGAGGTGAAGAGGCCTGGGGCCTCAATGAAGGTCTCCTG |
| | VL-P × E2M VH- | | | CAAGGCTTCTGGGTACACCTTCACCAACTACTATATACACTGGGTGCGACAGGCCCCTGGACAAG |
| | VL-P | | | GTCTTGAGTGGATGGGTTGGATCAACCCTAACAGTGGTGCCACAAACTATGCACAGAAGTTCCAG |
| | | | | GGCAGAGTCACCATGACCAGGGACACGTCCACGAGCACAGTCTACATGGAGCTGAGCAGCCTGAG |
| | | | | ATCTGAGGACACGGCCGTGTATTACTGTGCGAAATCCTGGGTCTCCTGGTTTGCTTCCTGGGGTC |
| | | | | AAGGAACCTTGGTCACCGTCTCCTCAGGTGGTGGTGGTTCTGGCGGCGGCGGCTCCGGTGGTGGT |
| | | | | GGTTCTGAGCTCGTGATGACCCAGTCTCCAGACTCCCTGGCTGTGTCTCTGGGCGAGAGGGCCAC |
| | | | | CATCAACTGCAAGTCCAGCCAGAGTGTTTTAAACAGCTCCAACAATAGGAACTACTTAGCTTGGT |
| | | | | ACCAGCAGAAACCAGGACAGCCTCCTAAGCTGCTCATTTACTGGGCATCTACCCGGGAATCCGGG |
| | | | | GTCCCTGACCGATTCAGTGGCAGCGGGTCTGGGACAGATTTCACTCTCACCATCAGTGGCCTGCA |
| | | | | GGCTGAAGATGTGGCAGTTTATTACTGTCAGCAACATTATAGTACTCCATTCACTTTTGGCCCTG |
| | | | | GGACCAAAGTGGATATCAAATCCGGAGGTGGTGGATCCGAGGTGCAGCTGCTCGAGTCTGGAGGA |
| | | | | GGATTGGTGCAGCCTGGAGGGTCATTGAAACTCTCATGTGCAGCCTCTGGATTCACCTTCAATGG |
| | | | | CTACGCCATGAACTGGGTCCGCCAGGCTCCAGGAAAGGGTTTGGAATGGGTTGCTCGCATAAGAA |
| | | | | GTAAATATAATAATTATGCAACATATTATGCCGATTCAGTGAAAGAGAGGTTCACCATCTCCAGA |
| | | | | GATGATTCAAAAAACACTGCCTATCTACAAATGAACAACTTGAAAACTGAGGACACTGCCGTGTA |
| | | | | CTACTGTGTGAGACATAGGAACTTCGGTAATAGCTACTTATCCTGGTTCGCTTACTGGGGCCAAG |
| | | | | GGACTCTGGTCACCGTCTCCTCAGGTGGTGGTGGTTCTGGCGGCGGCGGCTCCGGTGGTGGTGGT |
| | | | | TCTGAGCTCGTTGTGACTCAGGAACCTTCACTCACCGTATCACCTGGTGGAACAGTCACACTCAC |
| | | | | TTGTCGCTCCTCGACTGGGGCTGTTACATCTGGCTACTACCCAAACTGGGTCCAACAAAAACCAG |
| | | | | GTCAGGCACCCCGTGGTCTAATAGGTGCCACTGACATGAGGCCCTCTGGTACTCCTGCCAGATTC |
| | | | | TCAGGCTCCCTGCTTGGAGGCAAGGCTGCCCTCACCCTCTCAGGGGTACAGCCAGAGGATGAGGC |
| | | | | AGAATATTACTGTGCTCTATGGTACAGCAACCGCTGGGTGTTCGGTGGAGGAACCAAACTGACTG |
| | | | | TCCTA |
| 329 | MCSP-G4 VH- | artificial | aa | QVQLVQSGAEVKRPGASMKVSCKASGYTFTNYYIHWVRQAPGQGLEWMGWINPNSGATNYAQKFQ |
| | VL-P × F7O VH- | | | GRVTMTRDTSTSTVYMELSSLRSEDTAVYYCAKSWVSWFASWGQGTLVTVSSGGGGSGGGGSGGG |
| | VL-P | | | GSELVMTQSPDSLAVSLGERATINCKSSQSVLNSSNNRNYLAWYQQKPGQPPKLLIYWASTRESG |
| | | | | VPDRFSGSGSGTDFTLTISGLQAEDVAVYYCQQHYSTPFTFGPGTKVDIKSGGGGSEVQLLESGG |
| | | | | GLVQPGGSLKLSCAASGFTFNVYAMNWVRQAPGKGLEWVARIRSKYNNYATYYADSVKKRFTISR |
| | | | | DDSKNTAYLQMNNLKTEDTAVYYCVRHGNFGNSYISWWAYWGQGTLVTVSSGGGGSGGGGSGGGG |
| | | | | SELVVTQEPSLTVSPGGTVTLTCGSSTGAVTSGYYPNWVQQKPGQAPRGLIGGTKFLAPGTPARF |
| | | | | SGSLLGGKAALTLSGVQPEDEAEYYCALWYSNRWVFGGGTKLTVL |
| 330 | MCSP-G4 VH- | artificial | nt | CAGGTGCAGCTGGTCCAGTCTGGGGCTGAGGTGAAGAGGCCTGGGGCCTCAATGAAGGTCTCCTG |
| | VL-P × F7O VH- | | | CAAGGCTTCTGGGTACACCTTCACCAACTACTATATACACTGGGTGCGACAGGCCCCTGGACAAG |
| | VL-P | | | GTCTTGAGTGGATGGGTTGGATCAACCCTAACAGTGGTGCCACAAACTATGCACAGAAGTTCCAG |
| | | | | GGCAGAGTCACCATGACCAGGGACACGTCCACGAGCACAGTCTACATGGAGCTGAGCAGCCTGAG |
| | | | | ATCTGAGGACACGGCCGTGTATTACTGTGCGAAATCCTGGGTCTCCTGGTTTGCTTCCTGGGGTC |
| | | | | AAGGAACCTTGGTCACCGTCTCCTCAGGTGGTGGTGGTTCTGGCGGCGGCGGCTCCGGTGGTGGT |
| | | | | GGTTCTGAGCTCGTGATGACCCAGTCTCCAGACTCCCTGGCTGTGTCTCTGGGCGAGAGGGCCAC |
| | | | | CATCAACTGCAAGTCCAGCCAGAGTGTTTTAAACAGCTCCAACAATAGGAACTACTTAGCTTGGT |
| | | | | ACCAGCAGAAACCAGGACAGCCTCCTAAGCTGCTCATTTACTGGGCATCTACCCGGGAATCCGGG |
| | | | | GTCCCTGACCGATTCAGTGGCAGCGGGTCTGGGACAGATTTCACTCTCACCATCAGTGGCCTGCA |
| | | | | GGCTGAAGATGTGGCAGTTTATTACTGTCAGCAACATTATAGTACTCCATTCACTTTTGGCCCTG |
| | | | | GGACCAAAGTGGATATCAAATCCGGAGGTGGTGGATCCGAGGTGCAGCTGCTCGAGTCTGGAGGA |
| | | | | GGATTGGTGCAGCCTGGAGGGTCATTGAAACTCTCATGTGCAGCCTCTGGATTCACCTTCAATGT |
| | | | | GTACGCCATGAACTGGGTCCGCCAGGCTCCAGGAAAGGGTTTGGAATGGGTTGCTCGCATAAGAA |
| | | | | GTAAATATAATAATTATGCAACATATTATGCCGATTCAGTGAAAAAGAGGTTCACCATCTCCAGA |
| | | | | GATGATTCAAAAAACACTGCCTATCTACAAATGAACAACTTGAAAACTGAGGACACTGCCGTGTA |
| | | | | CTACTGTGTGAGACATGGGAACTTCGGTAATAGCTACATATCCTGGTGGGCTTACTGGGGCCAAG |
| | | | | GGACTCTGGTCACCGTCTCCTCAGGTGGTGGTGGTTCTGGCGGCGGCGGCTCCGGTGGTGGTGGT |
| | | | | TCTGAGCTCGTTGTGACTCAGGAACCTTCACTCACCGTATCACCTGGTGGAACAGTCACACTCAC |
| | | | | TTGTGGCTCCTCGACTGGGGCTGTTACATCTGGCTACTACCCAAACTGGGTCCAACAAAAACCAG |
| | | | | GTCAGGCACCCCGTGGTCTAATAGGTGGGACTAAGTTCCTCGCCCCCGGTACTCCTGCCAGATTC |
| | | | | TCAGGCTCCCTGCTTGGAGGCAAGGCTGCCCTCACCCTCTCAGGGGTACAGCCAGAGGATGAGGC |
| | | | | AGAATATTACTGTGCTCTATGGTACAGCAACCGCTGGGTGTTCGGTGGAGGAACCAAACTGACTG |
| | | | | TCCTA |
| 331 | MCSP-G4 VH- | artificial | aa | QVQLVQSGAEVKRPGASMKVSCKASGYTFTNYYIHWVRQAPGQGLEWMGWINPNSGATNYAQKFQ |
| | VL-P × F12Q VH- | | | GRVTMTRDTSTSTVYMELSSLRSEDTAVYYCAKSWVSWFASWGQGTLVTVSSGGGGSGGGGSGGG |
| | VL | | | GSELVMTQSPDSLAVSLGERATINCKSSQSVLNSSNNRNYLAWYQQKPGQPPKLLIYWASTRESG |
| | | | | VPDRFSGSGSGTDFTLTISGLQAEDVAVYYCQQHYSTPFTFGPGTKVDIKSGGGGSEVQLVESGG |
| | | | | GLVQPGGSLKLSCAASGFTFNSYAMNWVRQAPGKGLEWVARIRSKYNNYATYYADSVKGRFTISR |
| | | | | DDSKNTAYLQMNNLKTEDTAVYYCVRHGNFGNSYVSWWAYWGQGTLVTVSSGGGGSGGGGSGGGG |
| | | | | SQTVVTQEPSLTVSPGGTVTLTCGSSTGAVTSGNYPNWVQQKPGQAPRGLIGGTKFLAPGTPARF |
| | | | | SGSLLGGKAALTLSGVQPEDEAEYYCVLWYSNRWVFGGGTKLTVL |
| 332 | MCSP-G4 VH- | artificial | nt | CAGGTGCAGCTGGTCCAGTCTGGGGCTGAGGTGAAGAGGCCTGGGGCCTCAATGAAGGTCTCCTG |
| | VL-P × F12Q VH- | | | CAAGGCTTCTGGGTACACCTTCACCAACTACTATATACACTGGGTGCGACAGGCCCCTGGACAAG |
| | VL | | | GTCTTGAGTGGATGGGTTGGATCAACCCTAACAGTGGTGCCACAAACTATGCACAGAAGTTCCAG |
| | | | | GGCAGAGTCACCATGACCAGGGACACGTCCACGAGCACAGTCTACATGGAGCTGAGCAGCCTGAG |
| | | | | ATCTGAGGACACGGCCGTGTATTACTGTGCGAAATCCTGGGTCTCCTGGTTTGCTTCCTGGGGTC |
| | | | | AAGGAACCTTGGTCACCGTCTCCTCAGGTGGTGGTGGTTCTGGCGGCGGCGGCTCCGGTGGTGGT |
| | | | | GGTTCTGAGCTCGTGATGACCCAGTCTCCAGACTCCCTGGCTGTGTCTCTGGGCGAGAGGGCCAC |
| | | | | CATCAACTGCAAGTCCAGCCAGAGTGTTTTAAACAGCTCCAACAATAGGAACTACTTAGCTTGGT |
| | | | | ACCAGCAGAAACCAGGACAGCCTCCTAAGCTGCTCATTTACTGGGCATCTACCCGGGAATCCGGG |
| | | | | GTCCCTGACCGATTCAGTGGCAGCGGGTCTGGGACAGATTTCACTCTCACCATCAGTGGCCTGCA |
| | | | | GGCTGAAGATGTGGCAGTTTATTACTGTCAGCAACATTATAGTACTCCATTCACTTTTGGCCCTG |
| | | | | GGACCAAAGTGGATATCAAATCCGGAGGTGGTGGATCCGAGGTGCAGCTGGTCGAGTCTGGAGGA |
| | | | | GGATTGGTGCAGCCTGGAGGGTCATTGAAACTCTCATGTGCAGCCTCTGGATTCACCTTCAATAG |
| | | | | CTACGCCATGAACTGGGTCCGCCAGGCTCCAGGAAAGGGTTTGGAATGGGTTGCTCGCATAAGAA |
| | | | | GTAAATATAATAATTATGCAACATATTATGCCGATTCAGTGAAAGGCAGGTTCACCATCTCCAGA |
| | | | | GATGATTCAAAAAACACTGCCTATCTACAAATGAACAACTTGAAAACTGAGGACACTGCCGTGTA |
| | | | | CTACTGTGTGAGACATGGGAACTTCGGTAATAGCTACGTTTCCTGGTGGGCTTACTGGGGCCAAG |
| | | | | GGACTCTGGTCACCGTCTCCTCAGGTGGTGGTGGTTCTGGCGGCGGCGGCTCCGGTGGTGGTGGT |
| | | | | TCTCAGACTGTTGTGACTCAGGAACCTTCACTCACCGTATCACCTGGTGGAACAGTCACACTCAC |
| | | | | TTGTGGCTCCTCGACTGGGGCTGTTACATCTGGCAACTACCCAAACTGGGTCCAACAAAAACCAG |
| | | | | GTCAGGCACCCCGTGGTCTAATAGGTGGGACTAAGTTCCTCGCCCCCGGTACTCCTGCCAGATTC |
| | | | | TCAGGCTCCCTGCTTGGAGGCAAGGCTGCCCTCACCCTCTCAGGGGTACAGCCAGAGGATGAGGC |
| | | | | AGAATATTACTGTGTTCTATGGTACAGCAACCGCTGGGTGTTCGGTGGAGGAACCAAACTGACTG |
| | | | | TCCTA |
| 333 | MCSP-G4 VH- | artificial | aa | QVQLVQSGAEVKRPGASMKVSCKASGYTFTNYYIHWVRQAPGQGLEWMGWINPNSGATNYAQKFQ |
| | VL-P × I2C VH- | | | GRVTMTRDTSTSTVYMELSSLRSEDTAVYYCAKSWVSWFASWGQGTLVTVSSGGGGSGGGGSGGG |
| | VL | | | GSELVMTQSPDSLAVSLGERATINCKSSQSVLNSSNNRNYLAWYQQKPGQPPKLLIYWASTRESG |
| | | | | VPDRFSGSGSGTDFTLTISGLQAEDVAVYYCQQHYSTPFTFGPGTKVDIKSGGGGSEVQLVESGG |
| | | | | GLVQPGGSLKLSCAASGFTFNKYAMNWVRQAPGKGLEWVARIRSKYNNYATYYADSVKDRFTISR |
| | | | | DDSKNTAYLQMNNLKTEDTAVYYCVRHGNFGNSYISYWAYWGQGTLVTVSSGGGGSGGGGSGGGG |
| | | | | SQTVVTQEPSLTVSPGGTVTLTCGSSTGAVTSGNYPNWVQQKPGQAPRGLIGGTKFLAPGTPARF |
| | | | | SGSLLGGKAALTLSGVQPEDEAEYYCVLWYSNRWVFGGGTKLTVL |
| 334 | MCSP-G4 VH- | artificial | nt | CAGGTGCAGCTGGTCCAGTCTGGGGCTGAGGTGAAGAGGCCTGGGGCCTCAATGAAGGTCTCCTG |
| | VL-P × I2C VH- | | | CAAGGCTTCTGGGTACACCTTCACCAACTACTATATACACTGGGTGCGACAGGCCCCTGGACAAG |
| | VL | | | GTCTTGAGTGGATGGGTTGGATCAACCCTAACAGTGGTGCCACAAACTATGCACAGAAGTTCCAG |
| | | | | GGCAGAGTCACCATGACCAGGGACACGTCCACGAGCACAGTCTACATGGAGCTGAGCAGCCTGAG |
| | | | | ATCTGAGGACACGGCCGTGTATTACTGTGCGAAATCCTGGGTCTCCTGGTTTGCTTCCTGGGGTC |
| | | | | AAGGAACCTTGGTCACCGTCTCCTCAGGTGGTGGTGGTTCTGGCGGCGGCGGCTCCGGTGGTGGT |
| | | | | GGTTCTGAGCTCGTGATGACCCAGTCTCCAGACTCCCTGGCTGTGTCTCTGGGCGAGAGGGCCAC |
| | | | | CATCAACTGCAAGTCCAGCCAGAGTGTTTTAAACAGCTCCAACAATAGGAACTACTTAGCTTGGT |
| | | | | ACCAGCAGAAACCAGGACAGCCTCCTAAGCTGCTCATTTACTGGGCATCTACCCGGGAATCCGGG |
| | | | | GTCCCTGACCGATTCAGTGGCAGCGGGTCTGGGACAGATTTCACTCTCACCATCAGTGGCCTGCA |
| | | | | GGCTGAAGATGTGGCAGTTTATTACTGTCAGCAACATTATAGTACTCCATTCACTTTTGGCCCTG |
| | | | | GGACCAAAGTGGATATCAAATCCGGAGGTGGTGGATCCGAGGTGCAGCTGGTCGAGTCTGGAGGA |
| | | | | GGATTGGTGCAGCCTGGAGGGTCATTGAAACTCTCATGTGCAGCCTCTGGATTCACCTTCAATAA |
| | | | | GTACGCCATGAACTGGGTCCGCCAGGCTCCAGGAAAGGGTTTGGAATGGGTTGCTCGCATAAGAA |
| | | | | GTAAATATAATAATTATGCAACATATTATGCCGATTCAGTGAAAGACAGGTTCACCATCTCCAGA |
| | | | | GATGATTCAAAAAACACTGCCTATCTACAAATGAACAACTTGAAAACTGAGGACACTGCCGTGTA |
| | | | | CTACTGTGTGAGACATGGGAACTTCGGTAATAGCTACATATCCTACTGGGCTTACTGGGGCCAAG |
| | | | | GGACTCTGGTCACCGTCTCCTCAGGTGGTGGTGGTTCTGGCGGCGGCGGCTCCGGTGGTGGTGGT |
| | | | | TCTCAGACTGTTGTGACTCAGGAACCTTCACTCACCGTATCACCTGGTGGAACAGTCACACTCAC |
| | | | | TTGTGGCTCCTCGACTGGGGCTGTTACATCTGGCAACTACCCAAACTGGGTCCAACAAAAACCAG |
| | | | | GTCAGGCACCCCGTGGTCTAATAGGTGGGACTAAGTTCCTCGCCCCCGGTACTCCTGCCAGATTC |
| | | | | TCAGGCTCCCTGCTTGGAGGCAAGGCTGCCCTCACCCTCTCAGGGGTACAGCCAGAGGATGAGGC |
| | | | | AGAATATTACTGTGTTCTATGGTACAGCAACCGCTGGGTGTTCGGTGGAGGAACCAAACTGACTG |
| | | | | TCCTA |
| 335 | MCSP-D2 VH-VL × | artificial | aa | QVQLVQSGAEVKKPGASVKVSCKASGYTFTGYYMHWVRQAPGQGLEWMGWINPNSGGTSYAQKFQ |
| | H2C VH-VL | | | GRVTMTRDTSTSTVYMELSNLRSDDTAVYYCAKSWVSWFASWGQGTLVTVSSGGGGSGGGGSGGG |
| | | | | GSDIVMTQSPDSLAVSLGERATINCKSSQSVLNSSNNRNYLAWYQQKPGQPPKLLIYWASTRESG |
| | | | | VPDRFSGSGSGTDFTLTISGLQAEDVAVYYCQQHYSTPFTFGPGTKVDIKSGGGGSEVQLVESGG |
| | | | | GLVQPGGSLKLSCAASGFTFNKYAMNWVRQAPGKGLEWVARIRSKYNNYATYYADSVKDRFTISR |
| | | | | DDSKNTAYLQMNNLKTEDTAVYYCVRHGNFGNSYISYWAYWGQGTLVTVSSGGGGSGGGGSGGGG |
| | | | | SQTVVTQEPSLTVSPGGTVTLTCGSSTGAVTSGYYPNWVQQKPGQAPRGLIGGTKFLAPGTPARF |
| | | | | SGSLLGGKAALTLSGVQPEDEAEYYCALWYSNRWVFGGGTKLTVL |
| 336 | MCSP-D2 VH-VL × | artificial | nt | CAGGTGCAGCTGGTCCAGTCTGGGGCTGAGGTGAAGAAGCCTGGGGCCTCAGTGAAGGTCTCCTG |
| | H2C VH-VL | | | CAAGGCTTCTGGATACACCTTCACCGGCTACTATATGCACTGGGTGCGACAGGCCCCTGGACAAG |
| | | | | GGCTTGAGTGGATGGGATGGATCAACCCTAACAGTGGTGGCACAAGCTACGCACAGAAGTTCCAG |
| | | | | GGCAGAGTCACCATGACTAGGGACACGTCCACGAGCACAGTCTACATGGAGCTGAGCAACCTGAG |
| | | | | ATCTGACGACACGGCCGTGTATTACTGTGCGAAATCCTGGGTCTCCTGGTTTGCTTCCTGGGGTC |
| | | | | AAGGAACCTTGGTCACCGTCTCCTCAGGTGGTGGTGGTTCTGGCGGCGGCGGCTCCGGTGGTGGT |
| | | | | GGTTCTGATATCGTGATGACCCAGTCTCCAGACTCCCTGGCTGTGTCTCTGGGCGAGAGGGCCAC |
| | | | | CATCAACTGCAAGTCCAGCCAGAGTGTTTTAAACAGCTCCAACAATAGGAACTACTTAGCTTGGT |
| | | | | ACCAGCAGAAACCAGGACAGCCTCCTAAGCTGCTCATTTACTGGGCATCTACCCGGGAATCCGGG |
| | | | | GTCCCTGACCGATTCAGTGGCAGCGGGTCTGGGACAGATTTCACTCTCACCATCAGTGGCCTGCA |
| | | | | GGCTGAAGATGTGGCAGTTTATTACTGTCAGCAACATTATAGTACTCCATTCACTTTTGGCCCTG |
| | | | | GGACCAAAGTGGATATCAAATCCGGAGGTGGTGGATCCGAGGTGCAGCTGGTCGAGTCTGGAGGA |
| | | | | GGATTGGTGCAGCCTGGAGGGTCATTGAAACTCTCATGTGCAGCCTCTGGATTCACCTTCAATAA |
| | | | | GTACGCCATGAACTGGGTCCGCCAGGCTCCAGGAAAGGGTTTGGAATGGGTTGCTCGCATAAGAA |
| | | | | GTAAATATAATAATTATGCAACATATTATGCCGATTCAGTGAAAGACAGGTTCACCATCTCCAGA |
| | | | | GATGATTCAAAAAACACTGCCTATCTACAAATGAACAACTTGAAAACTGAGGACACTGCCGTGTA |
| | | | | CTACTGTGTGAGACATGGGAACTTCGGTAATAGCTACATATCCTACTGGGCTTACTGGGGCCAAG |
| | | | | GGACTCTGGTCACCGTCTCCTCAGGTGGTGGTGGTTCTGGCGGCGGCGGCTCCGGTGGTGGTGGT |
| | | | | TCTCAGACTGTTGTGACTCAGGAACCTTCACTCACCGTATCACCTGGTGGAACAGTCACACTCAC |
| | | | | TTGTGGCTCCTCGACTGGGGCTGTTACATCTGGCTACTACCCAAACTGGGTCCAACAAAAACCAG |
| | | | | GTCAGGCACCCCGTGGTCTAATAGGTGGGACTAAGTTCCTCGCCCCCGGTACTCCTGCCAGATTC |
| | | | | TCAGGCTCCCTGCTTGGAGGCAAGGCTGCCCTCACCCTCTCAGGGGTACAGCCAGAGGATGAGGC |
| | | | | AGAATATTACTGTGCTCTATGGTACAGCAACCGCTGGGTGTTCGGTGGAGGAACCAAACTGACTG |
| | | | | TCCTA |
| 337 | MCSP-D2 VH-VL × | artificial | aa | QVQLVQSGAEVKKPGASVKVSCKASGYTFTGYYMHWVRQAPGQGLEWMGWINPNSGGTSYAQKFQ |
| | F12Q VH-VL | | | GRVTMTRDTSTSTVYMELSNLRSDDTAVYYCAKSWVSWFASWGQGTLVTVSSGGGGSGGGGSGGG |
| | | | | GSDIVMTQSPDSLAVSLGERATINCKSSQSVLNSSNNRNYLAWYQQKPGQPPKLLIYWASTRESG |
| | | | | VPDRFSGSGSGTDFTLTISGLQAEDVAVYYCQQHYSTPFTFGPGTKVDIKSGGGGSEVQLVESGG |
| | | | | GLVQPGGSLKLSCAASGFTFNSYAMNWVRQAPGKGLEWVARIRSKYNNYATYYADSVKGRFTISR |
| | | | | DDSKNTAYLQMNNLKTEDTAVYYCVRHGNFGNSYVSWWAYWGQGTLVTVSSGGGGSGGGGSGGGG |
| | | | | SQTVVTQEPSLTVSPGGTVTLTCGSSTGAVTSGNYPNWVQQKPGQAPRGLIGGTKFLAPGTPARF |
| | | | | SGSLLGGKAALTLSGVQPEDEAEYYCVLWYSNRWVFGGGTKLTVL |
| 338 | MCSP-D2 VH-VL × | artificial | nt | CAGGTGCAGCTGGTCCAGTCTGGGGCTGAGGTGAAGAAGCCTGGGGCCTCAGTGAAGGTCTCCTG |
| | F12Q VH-VL | | | CAAGGCTTCTGGATACACCTTCACCGGCTACTATATGCACTGGGTGCGACAGGCCCCTGGACAAG |
| | | | | GGCTTGAGTGGATGGGATGGATCAACCCTAACAGTGGTGGCACAAGCTACGCACAGAAGTTCCAG |
| | | | | GGCAGAGTCACCATGACTAGGGACACGTCCACGAGCACAGTCTACATGGAGCTGAGCAACCTGAG |
| | | | | ATCTGACGACACGGCCGTGTATTACTGTGCGAAATCCTGGGTCTCCTGGTTTGCTTCCTGGGGTC |
| | | | | AAGGAACCTTGGTCACCGTCTCCTCAGGTGGTGGTGGTTCTGGCGGCGGCGGCTCCGGTGGTGGT |
| | | | | GGTTCTGATATCGTGATGACCCAGTCTCCAGACTCCCTGGCTGTGTCTCTGGGCGAGAGGGCCAC |
| | | | | CATCAACTGCAAGTCCAGCCAGAGTGTTTTAAACAGCTCCAACAATAGGAACTACTTAGCTTGGT |
| | | | | ACCAGCAGAAACCAGGACAGCCTCCTAAGCTGCTCATTTACTGGGCATCTACCCGGGAATCCGGG |
| | | | | GTCCCTGACCGATTCAGTGGCAGCGGGTCTGGGACAGATTTCACTCTCACCATCAGTGGCCTGCA |
| | | | | GGCTGAAGATGTGGCAGTTTATTACTGTCAGCAACATTATAGTACTCCATTCACTTTTGGCCCTG |
| | | | | GGACCAAAGTGGATATCAAATCCGGAGGTGGTGGATCCGAGGTGCAGCTGGTCGAGTCTGGAGGA |
| | | | | GGATTGGTGCAGCCTGGAGGGTCATTGAAACTCTCATGTGCAGCCTCTGGATTCACCTTCAATAG |
| | | | | CTACGCCATGAACTGGGTCCGCCAGGCTCCAGGAAAGGGTTTGGAATGGGTTGCTCGCATAAGAA |
| | | | | GTAAATATAATAATTATGCAACATATTATGCCGATTCAGTGAAAGGCAGGTTCACCATCTCCAGA |
| | | | | GATGATTCAAAAAACACTGCCTATCTACAAATGAACAACTTGAAAACTGAGGACACTGCCGTGTA |
| | | | | CTACTGTGTGAGACATGGGAACTTCGGTAATAGCTACGTTTCCTGGTGGGCTTACTGGGGCCAAG |
| | | | | GGACTCTGGTCACCGTCTCCTCAGGTGGTGGTGGTTCTGGCGGCGGCGGCTCCGGTGGTGGTGGT |
| | | | | TCTCAGACTGTTGTGACTCAGGAACCTTCACTCACCGTATCACCTGGTGGAACAGTCACACTCAC |
| | | | | TTGTGGCTCCTCGACTGGGGCTGTTACATCTGGCAACTACCCAAACTGGGTCCAACAAAAACCAG |
| | | | | GTCAGGCACCCCGTGGTCTAATAGGTGGGACTAAGTTCCTCGCCCCCGGTACTCCTGCCAGATTC |
| | | | | TCAGGCTCCCTGCTTGGAGGCAAGGCTGCCCTCACCCTCTCAGGGGTACAGCCAGAGGATGAGGC |
| | | | | AGAATATTACTGTGTTCTATGGTACAGCAACCGCTGGGTGTTCGGTGGAGGAACCAAACTGACTG |
| | | | | TCCTA |
| 339 | MCSP-D2 VH-VL × | artificial | aa | QVQLVQSGAEVKKPGASVKVSCKASGYTFTGYYMHWVRQAPGQGLEWMGWINPNSGGTSYAQKFQ |
| | I2C VH-VL | | | GRVTMTRDTSTSTVYMELSNLRSDDTAVYYCAKSWVSWFASWGQGTLVTVSSGGGGSGGGGSGGG |
| | | | | GSDIVMTQSPDSLAVSLGERATINCKSSQSVLNSSNNRNYLAWYQQKPGQPPKLLIYWASTRESG |
| | | | | VPDRFSGSGSGTDFTLTISGLQAEDVAVYYCQQHYSTPFTFGPGTKVDIKSGGGGSEVQLVESGG |
| | | | | GLVQPGGSLKLSCAASGFTFNKYAMNWVRQAPGKGLEWVARIRSKYNNYATYYADSVKDRFTISR |
| | | | | DDSKNTAYLQMNNLKTEDTAVYYCVRHGNFGNSYISYWAYWGQGTLVTVSSGGGGSGGGGSGGGG |
| | | | | SQTVVTQEPSLTVSPGGTVTLTCGSSTGAVTSGNYPNWVQQKPGQAPRGLIGGTKFLAPGTPARF |
| | | | | SGSLLGGKAALTLSGVQPEDEAEYYCVLWYSNRWVFGGGTKLTVL |
| 340 | MCSP-D2 VH-VL × | artificial | nt | CAGGTGCAGCTGGTCCAGTCTGGGGCTGAGGTGAAGAAGCCTGGGGCCTCAGTGAAGGTCTCCTG |
| | I2C VH-VL | | | CAAGGCTTCTGGATACACCTTCACCGGCTACTATATGCACTGGGTGCGACAGGCCCCTGGACAAG |
| | | | | GGCTTGAGTGGATGGGATGGATCAACCCTAACAGTGGTGGCACAAGCTACGCACAGAAGTTCCAG |
| | | | | GGCAGAGTCACCATGACTAGGGACACGTCCACGAGCACAGTCTACATGGAGCTGAGCAACCTGAG |
| | | | | ATCTGACGACACGGCCGTGTATTACTGTGCGAAATCCTGGGTCTCCTGGTTTGCTTCCTGGGGTC |
| | | | | AAGGAACCTTGGTCACCGTCTCCTCAGGTGGTGGTGGTTCTGGCGGCGGCGGCTCCGGTGGTGGT |
| | | | | GGTTCTGATATCGTGATGACCCAGTCTCCAGACTCCCTGGCTGTGTCTCTGGGCGAGAGGGCCAC |
| | | | | CATCAACTGCAAGTCCAGCCAGAGTGTTTTAAACAGCTCCAACAATAGGAACTACTTAGCTTGGT |
| | | | | ACCAGCAGAAACCAGGACAGCCTCCTAAGCTGCTCATTTACTGGGCATCTACCCGGGAATCCGGG |
| | | | | GTCCCTGACCGATTCAGTGGCAGCGGGTCTGGGACAGATTTCACTCTCACCATCAGTGGCCTGCA |
| | | | | GGCTGAAGATGTGGCAGTTTATTACTGTCAGCAACATTATAGTACTCCATTCACTTTTGGCCCTG |
| | | | | GGACCAAAGTGGATATCAAATCCGGAGGTGGTGGATCCGAGGTGCAGCTGGTCGAGTCTGGAGGA |
| | | | | GGATTGGTGCAGCCTGGAGGGTCATTGAAACTCTCATGTGCAGCCTCTGGATTCACCTTCAATAA |
| | | | | GTACGCCATGAACTGGGTCCGCCAGGCTCCAGGAAAGGGTTTGGAATGGGTTGCTCGCATAAGAA |
| | | | | GTAAATATAATAATTATGCAACATATTATGCCGATTCAGTGAAAGACAGGTTCACCATCTCCAGA |
| | | | | GATGATTCAAAAAACACTGCCTATCTACAAATGAACAACTTGAAAACTGAGGACACTGCCGTGTA |
| | | | | CTACTGTGTGAGACATGGGAACTTCGGTAATAGCTACATATCCTACTGGGCTTACTGGGGCCAAG |
| | | | | GGACTCTGGTCACCGTCTCCTCAGGTGGTGGTGGTTCTGGCGGCGGCGGCTCCGGTGGTGGTGGT |
| | | | | TCTCAGACTGTTGTGACTCAGGAACCTTCACTCACCGTATCACCTGGTGGAACAGTCACACTCAC |
| | | | | TTGTGGCTCCTCGACTGGGGCTGTTACATCTGGCAACTACCCAAACTGGGTCCAACAAAAACCAG |
| | | | | GTCAGGCACCCCGTGGTCTAATAGGTGGGACTAAGTTCCTCGCCCCCGGTACTCCTGCCAGATTC |
| | | | | TCAGGCTCCCTGCTTGGAGGCAAGGCTGCCCTCACCCTCTCAGGGGTACAGCCAGAGGATGAGGC |
| | | | | AGAATATTACTGTGTTCTATGGTACAGCAACCGCTGGGTGTTCGGTGGAGGAACCAAACTGACTG |
| | | | | TCCTA |
| 341 | MCSP-D2 VH- | artificial | aa | QVQLVQSGAEVKKPGASVKVSCKASGYTFTGYYMHWVRQAPGQGLEWMGWINPNSGGTSYAQKFQ |
| | VL-P × H2C VH- | | | GRVTMTRDTSTSTVYMELSNLRSDDTAVYYCAKSWVSWFASWGQGTLVTVSSGGGGSGGGGSGGG |
| | VL-P | | | GSELVMTQSPDSLAVSLGERATINCKSSQSVLNSSNNRNYLAWYQQKPGQPPKLLIYWASTRESG |
| | | | | VPDRFSGSGSGTDFTLTISGLQAEDVAVYYCQQHYSTPFTFGPGTKVDIKSGGGGSEVQLLESGG |
| | | | | GLVQPGGSLKLSCAASGFTFNKYAMNWVRQAPGKGLEWVARIRSKYNNYATYYADSVKDRFTISR |
| | | | | DDSKNTAYLQMNNLKTEDTAVYYCVRHGNFGNSYISYWAYWGQGTLVTVSSGGGGSGGGGSGGGG |
| | | | | SELVVTQEPSLTVSPGGTVTLTCGSSTGAVTSGYYPNWVQQKPGQAPRGLIGGTKFLAPGTPARF |
| | | | | SGSLLGGKAALTLSGVQPEDEAEYYCALWYSNRWVFGGGTKLTVL |
| 342 | MCSP-D2 VH- | artificial | nt | CAGGTGCAGCTGGTCCAGTCTGGGGCTGAGGTGAAGAAGCCTGGGGCCTCAGTGAAGGTCTCCTG |
| | VL-P × H2C VH- | | | CAAGGCTTCTGGATACACCTTCACCGGCTACTATATGCACTGGGTGCGACAGGCCCCTGGACAAG |
| | VL-P | | | GGCTTGAGTGGATGGGATGGATCAACCCTAACAGTGGTGGCACAAGCTACGCACAGAAGTTCCAG |
| | | | | GGCAGAGTCACCATGACTAGGGACACGTCCACGAGCACAGTCTACATGGAGCTGAGCAACCTGAG |
| | | | | ATCTGACGACACGGCCGTGTATTACTGTGCGAAATCCTGGGTCTCCTGGTTTGCTTCCTGGGGTC |
| | | | | AAGGAACCTTGGTCACCGTCTCCTCAGGTGGTGGTGGTTCTGGCGGCGGCGGCTCCGGTGGTGGT |
| | | | | GGTTCTGAGCTCGTGATGACCCAGTCTCCAGACTCCCTGGCTGTGTCTCTGGGCGAGAGGGCCAC |
| | | | | CATCAACTGCAAGTCCAGCCAGAGTGTTTTAAACAGCTCCAACAATAGGAACTACTTAGCTTGGT |
| | | | | ACCAGCAGAAACCAGGACAGCCTCCTAAGCTGCTCATTTACTGGGCATCTACCCGGGAATCCGGG |
| | | | | GTCCCTGACCGATTCAGTGGCAGCGGGTCTGGGACAGATTTCACTCTCACCATCAGTGGCCTGCA |
| | | | | GGCTGAAGATGTGGCAGTTTATTACTGTCAGCAACATTATAGTACTCCATTCACTTTTGGCCCTG |
| | | | | GGACCAAAGTGGATATCAAATCCGGAGGTGGTGGATCCGAGGTGCAGCTGCTCGAGTCTGGAGGA |
| | | | | GGATTGGTGCAGCCTGGAGGGTCATTGAAACTCTCATGTGCAGCCTCTGGATTCACCTTCAATAA |
| | | | | GTACGCCATGAACTGGGTCCGCCAGGCTCCAGGAAAGGGTTTGGAATGGGTTGCTCGCATAAGAA |
| | | | | GTAAATATAATAATTATGCAACATATTATGCCGATTCAGTGAAAGACAGGTTCACCATCTCCAGA |
| | | | | GATGATTCAAAAAACACTGCCTATCTACAAATGAACAACTTGAAAACTGAGGACACTGCCGTGTA |
| | | | | CTACTGTGTGAGACATGGGAACTTCGGTAATAGCTACATATCCTACTGGGCTTACTGGGGCCAAG |
| | | | | GGACTCTGGTCACCGTCTCCTCAGGTGGTGGTGGTTCTGGCGGCGGCGGCTCCGGTGGTGGTGGT |
| | | | | TCTGAGCTCGTTGTGACTCAGGAACCTTCACTCACCGTATCACCTGGTGGAACAGTCACACTCAC |
| | | | | TTGTGGCTCCTCGACTGGGGCTGTTACATCTGGCTACTACCCAAACTGGGTCCAACAAAAACCAG |
| | | | | GTCAGGCACCCCGTGGTCTAATAGGTGGGACTAAGTTCCTCGCCCCCGGTACTCCTGCCAGATTC |
| | | | | TCAGGCTCCCTGCTTGGAGGCAAGGCTGCCCTCACCCTCTCAGGGGTACAGCCAGAGGATGAGGC |
| | | | | AGAATATTACTGTGCTCTATGGTACAGCAACCGCTGGGTGTTCGGTGGAGGAACCAAACTGACTG |
| | | | | TCCTA |
| 343 | MCSP-F9 VH-VL × | artificial | aa | QVQLQESGPGLVKPSETLSLTCVVSGGSISSSNWWSWVRQPPGKGLEWLGTIYYNGNTYYNPSLK |
| | H2C VH-VL | | | SRVTISVDTSKNQFSLRLSSVTAADTAVYYCAKSWVSWFASWGQGTLVTVSSGGGGSGGGGSGGG |
| | | | | GSDIVMTQSPDSLAVSLGERATINCKSSQSVLSSSNNKNYLNWYQQKPGQPPKLLIYWASTRESG |
| | | | | VPDRFSGSGSGTDFTLTISSLQAEDVAVYYCQQHYSVPFTFGPGTKVDIKGGGGSEVQLVESGGG |
| | | | | LVQPGGSLKLSCAASGFTFNKYAMNWVRQAPGKGLEWVARIRSKYNNYATYYADSVKDRFTISRD |
| | | | | DSKNTAYLQMNNLKTEDTAVYYCVRHGNFGNSYISYWAYWGQGTLVTVSSGGGGSGGGGSGGGGS |
| | | | | QTVVTQEPSLTVSPGGTVTLTCGSSTGAVTSGYYPNWVQQKPGQAPRGLIGGTKFLAPGTPARFS |
| | | | | GSLLGGKAALTLSGVQPEDEAEYYCALWYSNRWVFGGGTKLTVL |
| 344 | MCSP-F9 VH-VL × | artificial | nt | CAGGTGCAGCTGCAAGAGTCTGGCCCAGGACTGGTGAAGCCTTCGGAGACCCTGTCCCTCACCTG |
| | H2C VH-VL | | | CGTTGTCTCTGGTGGCTCCATCAGCAGTAGTAACTGGTGGAGCTGGGTCCGCCAGCCCCCAGGGA |
| | | | | AGGGACTGGAGTGGCTTGGGACTATCTATTATAATGGGAATACCTACTACAACCCGTCCCTCAAG |
| | | | | AGTCGAGTCACCATCTCCGTAGACACGTCCAAGAACCAGTTCTCCCTGAGGCTGAGCTCTGTGAC |
| | | | | CGCCGCAGACACGGCCGTGTATTACTGTGCGAAATCCTGGGTCTCCTGGTTTGCTTCCTGGGGTC |
| | | | | AAGGAACCTTGGTCACCGTCTCCTCAGGTGGTGGTGGTTCTGGCGGCGGCGGCTCCGGTGGTGGT |
| | | | | GGTTCTGATATCGTGATGACACAGTCTCCAGACTCCCTGGCTGTGTCTCTGGGCGAGAGGGCCAC |
| | | | | CATCAACTGCAAGTCCAGCCAGAGTGTCTTATCCAGCTCCAACAATAAGAACTACTTAAATTGGT |
| | | | | ACCAGCAGAAACCAGGACAGCCTCCTAAGTTGCTCATTTACTGGGCATCTACCCGGGAATCCGGG |
| | | | | GTCCCTGACCGATTCAGTGGCAGCGGGTCTGGGACAGATTTCACTCTCACCATCAGCAGCCTGCA |
| | | | | GGCTGAAGATGTGGCAGTTTATTACTGTCAGCAACATTATAGTGTTCCATTCACTTTCGGCCCTG |
| | | | | GGACCAAAGTGGATATCAAAGGAGGTGGTGGCTCCGAGGTGCAGCTGGTCGAGTCTGGAGGAGGA |
| | | | | TTGGTGCAGCCTGGAGGGTCATTGAAACTCTCATGTGCAGCCTCTGGATTCACCTTCAATAAGTA |
| | | | | CGCCATGAACTGGGTCCGCCAGGCTCCAGGAAAGGGTTTGGAATGGGTTGCTCGCATAAGAAGTA |
| | | | | AATATAATAATTATGCAACATATTATGCCGATTCAGTGAAAGACAGGTTCACCATCTCCAGAGAT |
| | | | | GATTCAAAAAACACTGCCTATCTACAAATGAACAACTTGAAAACTGAGGACACTGCCGTGTACTA |
| | | | | CTGTGTGAGACATGGGAACTTCGGTAATAGCTACATATCCTACTGGGCTTACTGGGGCCAAGGGA |
| | | | | CTCTGGTCACCGTCTCCTCAGGTGGTGGTGGTTCTGGCGGCGGCGGCTCCGGTGGTGGTGGTTCT |
| | | | | CAGACTGTTGTGACTCAGGAACCTTCACTCACCGTATCACCTGGTGGAACAGTCACACTCACTTG |
| | | | | TGGCTCCTCGACTGGGGCTGTTACATCTGGCTACTACCCAAACTGGGTCCAACAAAAACCAGGTC |
| | | | | AGGCACCCCGTGGTCTAATAGGTGGGACTAAGTTCCTCGCCCCCGGTACTCCTGCCAGATTCTCA |
| | | | | GGCTCCCTGCTTGGAGGCAAGGCTGCCCTCACCCTCTCAGGGGTACAGCCAGAGGATGAGGCAGA |
| | | | | ATATTACTGTGCTCTATGGTACAGCAACCGCTGGGTGTTCGGTGGAGGAACCAAACTGACTGTCC |
| | | | | TA |
| 345 | MCSP-F9 VH-VL- | artificial | aa | EVQLQESGPGLVKPSETLSLTCVVSGGSISSSNWWSWVRQPPGKGLEWLGTIYYNGNTYYNPSLK |
| | P × H2C VH-VL-P | | | SRVTISVDTSKNQFSLRLSSVTAADTAVYYCAKSWVSWFASWGQGTLVTVSSGGGGSGGGGSGGG |
| | | | | GSELVMTQSPDSLAVSLGERATINCKSSQSVLSSSNNKNYLNWYQQKPGQPPKLLIYWASTRESG |
| | | | | VPDRFSGSGSGTDFTLTISSLQAEDVAVYYCQQHYSVPFTFGPGTKVDIKSGGGGSEVQLLESGG |
| | | | | GLVQPGGSLKLSCAASGFTFNKYAMNWVRQAPGKGLEWVARIRSKYNNYATYYADSVKDRFTISR |
| | | | | DDSKNTAYLQMNNLKTEDTAVYYCVRHGNFGNSYISYWAYWGQGTLVTVSSGGGGSGGGGSGGGG |
| | | | | SELVVTQEPSLTVSPGGTVTLTCGSSTGAVTSGYYPNWVQQKPGQAPRGLIGGTKFLAPGTPARF |
| | | | | SGSLLGGKAALTLSGVQPEDEAEYYCALWYSNRWVFGGGTKLTVL |
| 346 | MCSP-F9 VH-VL- | artificial | nt | GAGGTGCAGCTGCAAGAGTCTGGCCCAGGACTGGTGAAGCCTTCGGAGACCCTGTCCCTCACCTG |
| | P × H2C VH-VL-P | | | CGTTGTCTCTGGTGGCTCCATCAGCAGTAGTAACTGGTGGAGCTGGGTCCGCCAGCCCCCAGGGA |
| | | | | AGGGACTGGAGTGGCTTGGGACTATCTATTATAATGGGAATACCTACTACAACCCGTCCCTCAAG |
| | | | | AGTCGAGTCACCATCTCCGTAGACACGTCCAAGAACCAGTTCTCCCTGAGGCTGAGCTCTGTGAC |
| | | | | CGCCGCAGACACGGCCGTGTATTACTGTGCGAAATCCTGGGTCTCCTGGTTTGCTTCCTGGGGTC |
| | | | | AAGGAACCTTGGTCACCGTCTCCTCAGGTGGTGGTGGTTCTGGCGGCGGCGGCTCCGGTGGTGGT |
| | | | | GGTTCTGAGCTCGTGATGACACAGTCTCCAGACTCCCTGGCTGTGTCTCTGGGCGAGAGGGCCAC |
| | | | | CATCAACTGCAAGTCCAGCCAGAGTGTCTTATCCAGCTCCAACAATAAGAACTACTTAAATTGGT |
| | | | | ACCAGCAGAAACCAGGACAGCCTCCTAAGTTGCTCATTTACTGGGCATCTACCCGGGAATCCGGG |
| | | | | GTCCCTGACCGATTCAGTGGCAGCGGGTCTGGGACAGATTTCACTCTCACCATCAGCAGCCTGCA |
| | | | | GGCTGAAGATGTGGCAGTTTATTACTGTCAGCAACATTATAGTGTTCCATTCACTTTCGGCCCTG |
| | | | | GGACCAAAGTGGATATCAAATCCGGAGGTGGTGGATCCGAGGTGCAGCTGCTCGAGTCTGGAGGA |
| | | | | GGATTGGTGCAGCCTGGAGGGTCATTGAAACTCTCATGTGCAGCCTCTGGATTCACCTTCAATAA |
| | | | | GTACGCCATGAACTGGGTCCGCCAGGCTCCAGGAAAGGGTTTGGAATGGGTTGCTCGCATAAGAA |
| | | | | GTAAATATAATAATTATGCAACATATTATGCCGATTCAGTGAAAGACAGGTTCACCATCTCCAGA |
| | | | | GATGATTCAAAAAACACTGCCTATCTACAAATGAACAACTTGAAAACTGAGGACACTGCCGTGTA |
| | | | | CTACTGTGTGAGACATGGGAACTTCGGTAATAGCTACATATCCTACTGGGCTTACTGGGGCCAAG |
| | | | | GGACTCTGGTCACCGTCTCCTCAGGTGGTGGTGGTTCTGGCGGCGGCGGCTCCGGTGGTGGTGGT |
| | | | | TCTGAGCTCGTTGTGACTCAGGAACCTTCACTCACCGTATCACCTGGTGGAACAGTCACACTCAC |
| | | | | TTGTGGCTCCTCGACTGGGGCTGTTACATCTGGCTACTACCCAAACTGGGTCCAACAAAAACCAG |
| | | | | GTCAGGCACCCCGTGGTCTAATAGGTGGGACTAAGTTCCTCGCCCCCGGTACTCCTGCCAGATTC |
| | | | | TCAGGCTCCCTGCTTGGAGGCAAGGCTGCCCTCACCCTCTCAGGGGTACAGCCAGAGGATGAGGC |
| | | | | AGAATATTACTGTGCTCTATGGTACAGCAACCGCTGGGTGTTCGGTGGAGGAACCAAACTGACTG |
| | | | | TCCTA |
| 347 | MCSP-F9 VH-VL- | artificial | aa | EVQLQESGPGLVKPSETLSLTCVVSGGSISSSNWWSWVRQPPGKGLEWLGTIYYNGNTYYNPSLK |
| | P × G4H VH-VL-P | | | SRVTISVDTSKNQFSLRLSSVTAADTAVYYCAKSWVSWFASWGQGTLVTVSSGGGGSGGGGSGGG |
| | | | | GSELVMTQSPDSLAVSLGERATINCKSSQSVLSSSNNKNYLNWYQQKPGQPPKLLIYWASTRESG |
| | | | | VPDRFSGSGSGTDFTLTISSLQAEDVAVYYCQQHYSVPFTFGPGTKVDIKSGGGGSEVQLLESGG |
| | | | | GLVQPGGSLKLSCAASGFTFNRYAMNWVRQAPGKGLEWVARIRSKYNNYATYYADSVKGRFTISR |
| | | | | DDSKNTAYLQMNNLKTEDTAVYYCVRHGNFGNSYLSYFAYWGQGTLVTVSSGGGGSGGGGSGGGG |
| | | | | SELVVTQEPSLTVSPGGTVTLTCGSSTGAVTSGYYPNWVQQKPGQAPRGLIGGTKFLAPGTPARF |
| | | | | SGSLLGGKAALTLSGVQPEDEAEYYCALWYSNRWVFGGGTKLTVL |
| 348 | MCSP-F9 VH-VL- | artificial | nt | GAGGTGCAGCTGCAAGAGTCTGGCCCAGGACTGGTGAAGCCTTCGGAGACCCTGTCCCTCACCTG |
| | P × G4H VH-VL-P | | | CGTTGTCTCTGGTGGCTCCATCAGCAGTAGTAACTGGTGGAGCTGGGTCCGCCAGCCCCCAGGGA |
| | | | | AGGGACTGGAGTGGCTTGGGACTATCTATTATAATGGGAATACCTACTACAACCCGTCCCTCAAG |
| | | | | AGTCGAGTCACCATCTCCGTAGACACGTCCAAGAACCAGTTCTCCCTGAGGCTGAGCTCTGTGAC |
| | | | | CGCCGCAGACACGGCCGTGTATTACTGTGCGAAATCCTGGGTCTCCTGGTTTGCTTCCTGGGGTC |
| | | | | AAGGAACCTTGGTCACCGTCTCCTCAGGTGGTGGTGGTTCTGGCGGCGGCGGCTCCGGTGGTGGT |
| | | | | GGTTCTGAGCTCGTGATGACACAGTCTCCAGACTCCCTGGCTGTGTCTCTGGGCGAGAGGGCCAC |
| | | | | CATCAACTGCAAGTCCAGCCAGAGTGTCTTATCCAGCTCCAACAATAAGAACTACTTAAATTGGT |
| | | | | ACCAGCAGAAACCAGGACAGCCTCCTAAGTTGCTCATTTACTGGGCATCTACCCGGGAATCCGGG |
| | | | | GTCCCTGACCGATTCAGTGGCAGCGGGTCTGGGACAGATTTCACTCTCACCATCAGCAGCCTGCA |
| | | | | GGCTGAAGATGTGGCAGTTTATTACTGTCAGCAACATTATAGTGTTCCATTCACTTTCGGCCCTG |
| | | | | GGACCAAAGTGGATATCAAATCCGGAGGTGGTGGATCCGAGGTGCAGCTGCTCGAGTCTGGAGGA |
| | | | | GGATTGGTGCAGCCTGGAGGGTCATTGAAACTCTCATGTGCAGCCTCTGGATTCACCTTCAATCG |
| | | | | CTACGCCATGAACTGGGTCCGCCAGGCTCCAGGAAAGGGTTTGGAATGGGTTGCTCGCATAAGAA |
| | | | | GTAAATATAATAATTATGCAACATATTATGCCGATTCAGTGAAAGGGAGGTTCACCATCTCCAGA |
| | | | | GATGATTCAAAAAACACTGCCTATCTACAAATGAACAACTTGAAAACTGAGGACACTGCCGTGTA |
| | | | | CTACTGTGTGAGACATGGGAACTTCGGTAATAGCTACTTATCCTACTTCGCTTACTGGGGCCAAG |
| | | | | GGACTCTGGTCACCGTCTCCTCAGGTGGTGGTGGTTCTGGCGGCGGCGGCTCCGGTGGTGGTGGT |
| | | | | TCTGAGCTCGTTGTGACTCAGGAACCTTCACTCACCGTATCACCTGGTGGAACAGTCACACTCAC |
| | | | | TTGTGGCTCCTCGACTGGGGCTGTTACATCTGGCTACTACCCAAACTGGGTCCAACAAAAACCAG |
| | | | | GTCAGGCACCCCGTGGTCTAATAGGTGGGACTAAGTTCCTCGCCCCCGGTACTCCTGCCAGATTC |
| | | | | TCAGGCTCCCTGCTTGGAGGCAAGGCTGCCCTCACCCTCTCAGGGGTACAGCCAGAGGATGAGGC |
| | | | | AGAATATTACTGTGCTCTATGGTACAGCAACCGCTGGGTGTTCGGTGGAGGAACCAAACTGACTG |
| | | | | TCCTA |
| 349 | 1-27 CD3ε-Fc | artificial | aa | QDGNEEMGGITQTPYKVSISGTTVILTSGEPKSCDKTHTCPPCPAPELLGGPSVFLFPPKPKDTL |
| | | | | MISRTPEVTCVVVDVSHEDPEVKFNWYVDGVEVHNAKTKPREEQYNSTYRVVSVLTVLHQDWLNG |
| | | | | KEYKCKVSNKALPAPIEKTISKAKGQPREPQVYTLPPSREEMTKNQVSLTCLVKGFYPSDIAVEW |
| | | | | ESNGQPENNYKTTPPVLDSDGSFFLYSKLTVDKSRWQQGNVFSCSVMHEALHNHYTQKSLSLSPG |
| | | | | KHHHHHH |
| 350 | 1-27 CD3ε-Fc | artificial | cDNA | atgggatggagctgtatcatcctcttcttggtagcaacagctacaggtgtacactcccaagatgg |
| | | | | taatgaagaaatgggtggtattacacagacaccatataaagtctccatctctggaaccacagtaa |
| | | | | tattgacatccggagagcccaaatcttgtgacaaaactcacacatgcccaccgtgcccagcacct |
| | | | | gaactcctggggggaccgtcagtcttcctcttccccccaaaacccaaggacaccctcatgatctc |
| | | | | ccggacccctgaggtcacatgcgtggtggtggacgtgagccacgaagaccctgaggtcaagttca |
| | | | | actggtacgtggacggcgtggaggtgcataatgccaagacaaagccgcgggaggagcagtacaac |
| | | | | agcacgtaccgtgtggtcagcgtcctcaccgtcctgcaccaggactggctgaatggcaaggagta |
| | | | | caagtgcaaggtctccaacaaagccctcccagcccccatcgagaaaaccatctccaaagccaaag |
| | | | | ggcagccccgagaaccacaggtgtacaccctgcccccatcccgggaggagatgaccaagaaccag |
| | | | | gtcagcctgacctgcctggtcaaaggcttctatcccagcgacatcgccgtggagtgggagagcaa |
| | | | | tgggcagccggagaacaactacaagaccacgcctcccgtgctggactccgacggctccttcttcc |
| | | | | tctatagcaagctcaccgtggacaagagcaggtggcagcaggggaacgtcttctcatgctccgtg |
| | | | | atgcatgaggctctgcacaaccactacacgcagaagagcctctccctgtccccgggtaaacatca |
| | | | | tcaccatcatcat |
| 351 | human 1-27 | artificial | aa | QDGNEEMGGITQTPYKVSISGTTVILTDYKDDDDKTASFAAAQKECVCENYKLAVNCFLNDNGQC |
| | CD3ε-EpCAM | | | QCTSIGAQNTVLCSKLAAKCLVMKAEMNGSKLGRRAKPEGALQNNDGLYDPDCDESGLFKAKQCN |
| | | | | GTSTCWCVNTAGVRRTDKDTEITCSERVRTYWIIIELKHKAREKPYDVQSLRTALEEAIKTRYQL |
| | | | | DPKFITNILYEDNVITIDLVQNSSQKTQNDVDIADVAYYFEKDVKGESLFHSKKMDLRVNGEQLD |
| | | | | LDPGQTLIYYVDEKAPEFSMQGLKAGVIAVIVVVVIAIVAGIVVLVISRKKRMAKYEKAEIKEMG |
| | | | | EMHRELNA |
| 352 | human 1-27 | artificial | cDNA | atgggatggagctgtatcatcctcttcttggtagcaacagctacaggtgtacactcccaagatgg |
| | CD3ε-EpCAM | | | taatgaagaaatgggtggtattacacagacaccatataaagtctccatctctggaaccacagtaa |
| | | | | tattgacagattacaaggacgacgatgacaagactgcgagttttgccgcagctcagaaagaatgt |
| | | | | gtctgtgaaaactacaagctggccgtaaactgctttttgaatgacaatggtcaatgccagtgtac |
| | | | | ttcgattggtgcacaaaatactgtcctttgctcaaagctggctgccaaatgtttggtgatgaagg |
| | | | | cagaaatgaacggctcaaaacttgggagaagagcgaaacctgaaggggctctccagaacaatgat |
| | | | | ggcctttacgatcctgactgcgatgagagcgggctctttaaggccaagcagtgcaacggcacctc |
| | | | | cacgtgctggtgtgtgaacactgctggggtcagaagaactgacaaggacactgaaataacctgct |
| | | | | ctgagcgagtgagaacctactggatcatcattgaattaaaacacaaagcaagagaaaaaccttat |
| | | | | gatgttcaaagtttgcggactgcacttgaggaggcgatcaaaacgcgttatcaactggatccaaa |
| | | | | atttatcacaaatattttgtatgaggataatgttatcactattgatctggttcaaaattcttctc |
| | | | | agaaaactcagaatgatgtggacatagctgatgtggcttattattttgaaaaagatgttaaaggt |
| | | | | gaatccttgtttcattctaagaaaatggacctgagagtaaatggggaacaactggatctggatcc |
| | | | | tggtcaaactttaatttattatgtcgatgaaaaagcacctgaattctcaatgcagggtctaaaag |
| | | | | ctggtgttattgctgttattgtggttgtggtgatagcaattgttgctggaattgttgtgctggtt |
| | | | | atttccagaaagaagagaatggcaaagtatgagaaggctgagataaaggagatgggtgagatgca |
| | | | | tagggaactcaatgca |
| 353 | marmoset 1-27 | artificial | aa | QDGNEEMGDTTQNPYKVSISGTTVTLTDYKDDDDKTASFAAAQKECVCENYKLAVNCFLNDNGQC |
| | CD3ε-EpCAM | | | QCTSIGAQNTVLCSKLAAKCLVMKAEMNGSKLGRRAKPEGALQNNDGLYDPDCDESGLFKAKQCN |
| | | | | GTSTCWCVNTAGVRRTDKDTEITCSERVRTYWIIIELKHKAREKPYDVQSLRTALEEAIKTRYQL |
| | | | | DPKFITNILYEDNVITIDLVQNSSQKTQNDVDIADVAYYFEKDVKGESLFHSKKMDLRVNGEQLD |
| | | | | LDPGQTLIYYVDEKAPEFSMQGLKAGVIAVIVVVVIAIVAGIVVLVISRKKRMAKYEKAEIKEMG |
| | | | | EMHRELNA |
| 354 | marmoset 1-27 | artificial | cDNA | atgggatggagctgtatcatcctcttcttggtagcaacagctacaggtgtacactcccaggacgg |
| | CD3ε-EpCAM | | | taatgaagaaatgggtgatactacacagaacccatataaagtttccatctcaggaaccacagtaa |
| | | | | cactgacagattacaaggacgacgatgacaagactgcgagttttgccgcagctcagaaagaatgt |
| | | | | gtctgtgaaaactacaagctggccgtaaactgctttttgaatgacaatggtcaatgccagtgtac |
| | | | | ttcgattggtgcacaaaatactgtcctttgctcaaagctggctgccaaatgtttggtgatgaagg |
| | | | | cagaaatgaacggctcaaaacttgggagaagagcgaaacctgaaggggctctccagaacaatgat |
| | | | | ggcctttacgatcctgactgcgatgagagcgggctctttaaggccaagcagtgcaacggcacctc |
| | | | | cacgtgctggtgtgtgaacactgctggggtcagaagaactgacaaggacactgaaataacctgct |
| | | | | ctgagcgagtgagaacctactggatcatcattgaattaaaacacaaagcaagagaaaaaccttat |
| | | | | gatgttcaaagtttgcggactgcacttgaggaggcgatcaaaacgcgttatcaactggatccaaa |
| | | | | atttatcacaaatattttgtatgaggataatgttatcactattgatctggttcaaaattcttctc |
| | | | | agaaaactcagaatgatgtggacatagctgatgtggcttattattttgaaaaagatgttaaaggt |
| | | | | gaatccttgtttcattctaagaaaatggacctgagagtaaatggggaacaactggatctggatcc |
| | | | | tggtcaaactttaatttattatgtcgatgaaaaagcacctgaattctcaatgcagggtctaaaag |
| | | | | ctggtgttattgctgttattgtggttgtggtgatagcaattgttgctggaattgttgtgctggtt |
| | | | | atttccagaaagaagagaatggcaaagtatgagaaggctgagataaaggagatgggtgagatgca |
| | | | | tagggaactcaatgca |
| 355 | tamarin 1-27 | artificial | aa | QDGNEEMGDTTQNPYKVSISGTTVTLTDYKDDDDKTASFAAAQKECVCENYKLAVNCFLNDNGQC |
| | CD3ε-EpCAM | | | QCTSIGAQNTVLCSKLAAKCLVMKAEMNGSKLGRRAKPEGALQNNDGLYDPDCDESGLFKAKQCN |
| | | | | GTSTCWCVNTAGVRRTDKDTEITCSERVRTYWIIIELKHKAREKPYDVQSLRTALEEAIKTRYQL |
| | | | | DPKFITNILYEDNVITIDLVQNSSQKTQNDVDIADVAYYFEKDVKGESLFHSKKMDLRVNGEQLD |
| | | | | LDPGQTLIYYVDEKAPEFSMQGLKAGVIAVIVVVVIAIVAGIVVLVISRKKRMAKYEKAEIKEMG |
| | | | | EMHRELNA |
| 356 | tamarin 1-27 | artificial | cDNA | atgggatggagctgtatcatcctcttcttggtagcaacagctacaggtgtacactcccaggacgg |
| | CD3ε-EpCAM | | | taatgaagaaatgggtgatactacacagaacccatataaagtttccatctcaggaaccacagtaa |
| | | | | cactgacagattacaaggacgacgatgacaagactgcgagttttgccgcagctcagaaagaatgt |
| | | | | gtctgtgaaaactacaagctggccgtaaactgctttttgaatgacaatggtcaatgccagtgtac |
| | | | | ttcgattggtgcacaaaatactgtcctttgctcaaagctggctgccaaatgtttggtgatgaagg |
| | | | | cagaaatgaacggctcaaaacttgggagaagagcgaaacctgaaggggctctccagaacaatgat |
| | | | | ggcctttacgatcctgactgcgatgagagcgggctctttaaggccaagcagtgcaacggcacctc |
| | | | | cacgtgctggtgtgtgaacactgctggggtcagaagaactgacaaggacactgaaataacctgct |
| | | | | ctgagcgagtgagaacctactggatcatcattgaattaaaacacaaagcaagagaaaaaccttat |
| | | | | gatgttcaaagtttgcggactgcacttgaggaggcgatcaaaacgcgttatcaactggatccaaa |
| | | | | atttatcacaaatattttgtatgaggataatgttatcactattgatctggttcaaaattcttctc |
| | | | | agaaaactcagaatgatgtggacatagctgatgtggcttattattttgaaaaagatgttaaaggt |
| | | | | gaatccttgtttcattctaagaaaatggacctgagagtaaatggggaacaactggatctggatcc |
| | | | | tggtcaaactttaatttattatgtcgatgaaaaagcacctgaattctcaatgcagggtctaaaag |
| | | | | ctggtgttattgctgttattgtggttgtggtgatagcaattgttgctggaattgttgtgctggtt |
| | | | | atttccagaaagaagagaatggcaaagtatgagaaggctgagataaaggagatgggtgagatgca |
| | | | | tagggaactcaatgca |
| 357 | squirrel monkey | artificial | aa | atgggatggagctgtatcatcctcttcttggtagcaacagctacaggtgtacactcccaggacgg |
| | 1-27 CD3ε- | | | taatgaagagattggtgatactacccagaacccatataaagtttccatctcaggaaccacagtaa |
| | EpCAM | | | cactgacagattacaaggacgacgatgacaagactgcgagttttgccgcagctcagaaagaatgt |
| | | | | gtctgtgaaaactacaagctggccgtaaactgctttttgaatgacaatggtcaatgccagtgtac |
| | | | | ttcgattggtgcacaaaatactgtcctttgctcaaagctggctgccaaatgtttggtgatgaagg |
| | | | | cagaaatgaacggctcaaaacttgggagaagagcgaaacctgaaggggctctccagaacaatgat |
| | | | | ggcctttacgatcctgactgcgatgagagcgggctctttaaggccaagcagtgcaacggcacctc |
| | | | | cacgtgctggtgtgtgaacactgctggggtcagaagaactgacaaggacactgaaataacctgct |
| | | | | ctgagcgagtgagaacctactggatcatcattgaattaaaacacaaagcaagagaaaaaccttat |
| | | | | gatgttcaaagtttgcggactgcacttgaggaggcgatcaaaacgcgttatcaactggatccaaa |
| | | | | atttatcacaaatattttgtatgaggataatgttatcactattgatctggttcaaaattcttctc |
| | | | | agaaaactcagaatgatgtggacatagctgatgtggcttattattttgaaaaagatgttaaaggt |
| | | | | gaatccttgtttcattctaagaaaatggacctgagagtaaatggggaacaactggatctggatcc |
| | | | | tggtcaaactttaatttattatgtcgatgaaaaagcacctgaattctcaatgcagggtctaaaag |
| | | | | ctggtgttattgctgttattgtggttgtggtgatagcaattgttgctggaattgttgtgctggtt |
| | | | | atttccagaaagaagagaatggcaaagtatgagaaggctgagataaaggagatgggtgagatgca |
| | | | | tagggaactcaatgca |
| 358 | squirrel monkey | artificial | cDNA | QDGNEEIGDTTQNPYKVSISGTTVTLTDYKDDDDKTASFAAAQKECVCENYKLAVNCFLNDNGQC |
| | 1-27 CD3ε- | | | QCTSIGAQNTVLCSKLAAKCLVMKAEMNGSKLGRRAKPEGALQNNDGLYDPDCDESGLFKAKQCN |
| | EpCAM | | | GTSTCWCVNTAGVRRTDKDTEITCSERVRTYWIIIELKHKAREKPYDVQSLRTALEEAIKTRYQL |
| | | | | DPKFITNILYEDNVITIDLVQNSSQKTQNDVDIADVAYYFEKDVKGESLFHSKKMDLRVNGEQLD |
| | | | | LDPGQTLIYYVDEKAPEFSMQGLKAGVIAVIVVVVIAIVAGIVVLVISRKKRMAKYEKAEIKEMG |
| | | | | EMHRELNA |
| 359 | swine 1-27 CD3ε- | artificial | aa | QEDIERPDEDTQKTFKVSISGDKVELTDYKDDDDKTASFAAAQKECVCENYKLAVNCFLNDNGQC |
| | EpCAM | | | QCTSIGAQNTVLCSKLAAKCLVMKAEMNGSKLGRRAKPEGALQNNDGLYDPDCDESGLFKAKQCN |
| | | | | GTSTCWCVNTAGVRRTDKDTEITCSERVRTYWIIIELKHKAREKPYDVQSLRTALEEAIKTRYQL |
| | | | | DPKFITNILYEDNVITIDLVQNSSQKTQNDVDIADVAYYFEKDVKGESLFHSKKMDLRVNGEQLD |
| | | | | LDPGQTLIYYVDEKAPEFSMQGLKAGVIAVIVVVVIAIVAGIVVLVISRKKRMAKYEKAEIKEMG |
| | | | | EMHRELNA |
| 360 | swine 1-27 CD3ε- | artificial | cDNA | atgggatggagctgtatcatcctcttcttggtagcaacagctacaggtgtacactcccaagaaga |
| | EpCAM | | | cattgaaagaccagatgaagatacacagaaaacatttaaagtctccatctctggagacaaagtag |
| | | | | agctgacagattacaaggacgacgatgacaagactgcgagttttgccgcagctcagaaagaatgt |
| | | | | gtctgtgaaaactacaagctggccgtaaactgctttttgaatgacaatggtcaatgccagtgtac |
| | | | | ttcgattggtgcacaaaatactgtcctttgctcaaagctggctgccaaatgtttggtgatgaagg |
| | | | | cagaaatgaacggctcaaaacttgggagaagagcgaaacctgaaggggctctccagaacaatgat |
| | | | | ggcctttacgatcctgactgcgatgagagcgggctctttaaggccaagcagtgcaacggcacctc |
| | | | | cacgtgctggtgtgtgaacactgctggggtcagaagaactgacaaggacactgaaataacctgct |
| | | | | ctgagcgagtgagaacctactggatcatcattgaattaaaacacaaagcaagagaaaaaccttat |
| | | | | gatgttcaaagtttgcggactgcacttgaggaggcgatcaaaacgcgttatcaactggatccaaa |
| | | | | atttatcacaaatattttgtatgaggataatgttatcactattgatctggttcaaaattcttctc |
| | | | | agaaaactcagaatgatgtggacatagctgatgtggcttattattttgaaaaagatgttaaaggt |
| | | | | gaatccttgtttcattctaagaaaatggacctgagagtaaatggggaacaactggatctggatcc |
| | | | | tggtcaaactttaatttattatgtcgatgaaaaagcacctgaattctcaatgcagggtctaaaag |
| | | | | ctggtgttattgctgttattgtggttgtggtgatagcaattgttgctggaattgttgtgctggtt |
| | | | | atttccagaaagaagagaatggcaaagtatgagaaggctgagataaaggagatgggtgagatgca |
| | | | | tagggaactcaatgca |
| 361 | human CD3 | artificial | aa | QDGNEEMGGITQTPYKVSISGTTVILTCPQYPGSEILWQHNDKNIGGDEDDKNIGSDEDHLSLKE |
| | epsilon chain | | | FSELEQSGYYVCYPRGSKPEDANFYLYLRARVCENCMEMDVMSVATIVIVDICITGGLLLLVYYW |
| | | | | SKNRKAKAKPVTRGAGAGGRQRGQNKERPPPVPNPDYEPIRKGQRDLYSGLNQRRI |
| 362 | human CD3 | artificial | cDNA | atgcagtcgggcactcactggagagttctgggcctctgcctcttatcagttggcgtttgggggca |
| | epsilon chain | | | agatggtaatgaagaaatgggtggtattacacagacaccatataaagtctccatctctggaacca |
| | | | | cagtaatattgacatgccctcagtatcctggatctgaaatactatggcaacacaatgataaaaac |
| | | | | ataggcggtgatgaggatgataaaaacataggcagtgatgaggatcacctgtcactgaaggaatt |
| | | | | ttcagaattggagcaaagtggttattatgtctgctaccccagaggaagcaaaccagaagatgcga |
| | | | | acttttatctctacctgagggcacgcgtgtgtgagaactgcatggagatggatgtgatgtcggtg |
| | | | | gccacaattgtcatagtggacatctgcatcactgggggcttgctgctgctggtttactactggag |
| | | | | caagaatagaaaggccaaggccaagcctgtgacacgaggagcgggtgctggcggcaggcaaaggg |
| | | | | gacaaaacaaggagaggccaccacctgttcccaacccagactatgagcccatccggaaaggccag |
| | | | | cgggacctgtattctggcctgaatcagagacgcatc |
| 363 | 19 amino acid | artificial | aa | MGWSCIILFLVATATGVHS |
| | immunoglobulin | | | |
| | leader peptide | | | |
| 364 | 19 amino acid | artificial | cDNA | atgggatggagctgtatcatcctcttcttggtagcaacagctacaggtgtacactcc |
| | immunoglobulin | | | |
| | leader peptide | | | |
| 365 | murine IgG1 | murine | aa | AKTTPPSVYPLAPGSAAQTNSMVTLGCLVKGYFPEPVTVTWNSGSLSSGVHTFPAVLQSDLYTLS |
| | heavy chain | | | SSVTVPSSTWPSETVTCNVAHPASSTKVDKKIVPRDCGCKPCICTVPEVSSVFIFPPKPKDVLTI |
| | constant region | | | TLTPKVTCVVVDISKDDPEVQFSWFVDDVEVHTAQTQPREEQFNSTFRSVSELPIMHQDWLNGKE |
| | | | | FKCRVNSAAFPAPIEKTISKTKGRPKAPQVYTIPPPKEQMAKDKVSLTCMITDFFPEDITVEWQW |
| | | | | NGQPAENYKNTQPIMDTDGSYFVYSKLNVQKSNWEAGNTFTCSVLHEGLHNHHTEKSLSHSPGK |
| 366 | murine IgG1 | murine | cDNA | gccaaaacgacacccccatctgtctatccactggcccctggatctgctgcccaaactaactccat |
| | heavy chain | | | ggtgaccctgggatgcctggtcaagggctatttccctgagccagtgacagtgacctggaactctg |
| | constant region | | | gatccctgtccagcggtgtgcacaccttcccagctgtcctgcagtctgacctctacactctgagc |
| | | | | agctcagtgactgtcccctccagcacctggcccagcgagaccgtcacctgcaacgttgcccaccc |
| | | | | ggccagcagcaccaaggtggacaagaaaattgtgcccagggattgtggttgtaagccttgcatat |
| | | | | gtacagtcccagaagtatcatctgtcttcatcttccccccaaagcccaaggatgtgctcaccatt |
| | | | | actctgactcctaaggtcacgtgtgttgtggtagacatcagcaaggatgatcccgaggtccagtt |
| | | | | cagctggtttgtagatgatgtggaggtgcacacagctcagacgcaaccccgggaggagcagttca |
| | | | | acagcactttccgctcagtcagtgaacttcccatcatgcaccaggactggctcaatggcaaggag |
| | | | | ttcaaatgcagggtcaacagtgcagctttccctgcccccatcgagaaaaccatctccaaaaccaa |
| | | | | aggcagaccgaaggctccacaggtgtacaccattccacctcccaaggagcagatggccaaggata |
| | | | | aagtcagtctgacctgcatgataacagacttcttccctgaagacattactgtggagtggcagtgg |
| | | | | aatgggcagccagcggagaactacaagaacactcagcccatcatggacacagatggctcttactt |
| | | | | cgtctacagcaagctcaatgtgcagaagagcaactgggaggcaggaaatactttcacctgctctg |
| | | | | tgttacatgagggcctgcacaaccaccatactgagaagagcctctcccactctcctggtaaa |
| 367 | human lambda | human | aa | GQPKAAPSVTLFPPSSEELQANKATLVCLISDFYPGAVTVAWKADSSPVKAGVETTTPSKQSNNK |
| | light chain | | | YAASSYLSLTPEQWKSHKSYSCQVTHEGSTVEKTVAPTECS |
| | constant region | | | |
| 368 | human lambda | human | cDNA | ggtcagcccaaggctgccccctcggtcactctgttcccaccctcctctgaggagcttcaagccaa |
| | light chain | | | caaggccacactggtgtgtctcataagtgacttctacccgggagccgtgacagtggcctggaagg |
| | constant region | | | cagatagcagccccgtcaaggcgggagtggagaccaccacaccctccaaacaaagcaacaacaag |
| | | | | tacgcggccagcagctacctgagcctgacgcctgagcagtggaagtcccacaaaagctacagctg |
| | | | | ccaggtcacgcatgaagggagcaccgtggagaagacagtggcccctacagaatgttca |
| 369 | human EGFR | human | aa | LEEKKVCQGTSNKLTQLGTFEDHFLSLQRMFNNCEVVLGNLEITYVQRNYDLSFLKTIQEVAGYV |
| | | | | LIALNTVERIPLENLQIIRGNMYYENSYALAVLSNYDANKTGLKELPMRNLQEILHGAVRFSNNP |
| | | | | ALCNVESIQWRDIVSSDFLSNMSMDFQNHLGSCQKCDPSCPNGSCWGAGEENCQKLTKIICAQQC |
| | | | | SGRCRGKSPSDCCHNQCAAGCTGPRESDCLVCRKFRDEATCKDTCPPLMLYNPTTYQMDVNPEGK |
| | | | | YSFGATCVKKCPRNYVVTDHGSCVRACGADSYEMEEDGVRKCKKCEGPCRKVCNGIGIGEFKDSL |
| | | | | SINATNIKHFKNCTSISGDLHILPVAFRGDSFTHTPPLDPQELDILKTVKEITGFLLIQAWPENR |
| | | | | TDLHAFENLEIIRGRTKQHGQFSLAVVSLNITSLGLRSLKEISDGDVIISGNKNLCYANTINWKK |
| | | | | LFGTSGQKTKIISNRGENSCKATGQVCHALCSPEGCWGPEPRDCVSCRNVSRGRECVDKCNLLEG |
| | | | | EPREFVENSECIQCHPECLPQAMNITCTGRGPDNCIQCAHYIDGPHCVKTCPAGVMGENNTLVWK |
| | | | | YADAGHVCHLCHPNCTYGCTGPGLEGCPTNGPKIPSIATGMVGALLLLLVVALGIGLFMRRRHIV |
| | | | | RKRTLRRLLQERELVEPLTPSGEAPNQALLRILKETEFKKIKVLGSGAFGTVYKGLWIPEGEKVK |
| | | | | IPVAIKELREATSPKANKEILDEAYVMASVDNPHVCRLLGICLTSTVQLITQLMPFGCLLDYVRE |
| | | | | HKDNIGSQYLLNWCVQIAKGMNYLEDRRLVHRDLAARNVLVKTPQHVKITDFGLAKLLGAEEKEY |
| | | | | HAEGGKVPIKWMALESILHRIYTHQSDVWSYGVTVWELMTFGSKPYDGIPASEISSILEKGERLP |
| | | | | QPPICTIDVYMIMVKCWMIDADSRPKFRELIIEFSKMARDPQRYLVIQGDERMHLPSPTDSNFYR |
| | | | | ALMDEEDMDDVVDADEYLIPQQGFFSSPSTSRTPLLSSLSATSNNSTVACIDRNGLQSCPIKEDS |
| | | | | FLQRYSSDPTGALTEDSIDDTFLPVPEYINQSVPKRPAGSVQNPVYHNQPLNPAPSRDPHYQDPH |
| | | | | STAVGNPEYLNTVQPTCVNSTFDSPAHWAQKGSHQISLDNPDYQQDFFPKEAKPNGIFKGSTAEN |
| | | | | AEYLRVAPQSSEFIGA |
| 370 | human EGFR | human | cDNA | atgcgaccctccgggacggccggggcagcgctcctggcgctgctggctgcgctctgcccggcgag |
| | | | | tcgggctctggaggaaaagaaagtttgccaaggcacgagtaacaagctcacgcagttgggcactt |
| | | | | ttgaagatcattttctcagcctccagaggatgttcaataactgtgaggtggtccttgggaatttg |
| | | | | gaaattacctatgtgcagaggaattatgatctttccttcttaaagaccatccaggaggtggctgg |
| | | | | ttatgtcctcattgccctcaacacagtggagcgaattcctttggaaaacctgcagatcatcagag |
| | | | | gaaatatgtactacgaaaattcctatgccttagcagtcttatctaactatgatgcaaataaaacc |
| | | | | ggactgaaggagctgcccatgagaaatttacaggaaatcctgcatggcgccgtgcggttcagcaa |
| | | | | caaccctgccctgtgcaacgtggagagcatccagtggcgggacatagtcagcagtgactttctca |
| | | | | gcaacatgtcgatggacttccagaaccacctgggcagctgccaaaagtgtgatccaagctgtccc |
| | | | | aatgggagctgctggggtgcaggagaggagaactgccagaaactgaccaaaatcatctgtgccca |
| | | | | gcagtgctccgggcgctgccgtggcaagtcccccagtgactgctgccacaaccagtgtgctgcag |
| | | | | gctgcacaggcccccgggagagcgactgcctggtctgccgcaaattccgagacgaagccacgtgc |
| | | | | aaggacacctgccccccactcatgctctacaaccccaccacgtaccagatggatgtgaaccccga |
| | | | | gggcaaatacagctttggtgccacctgcgtgaagaagtgtccccgtaattatgtggtgacagatc |
| | | | | acggctcgtgcgtccgagcctgtggggccgacagctatgagatggaggaagacggcgtccgcaag |
| | | | | tgtaagaagtgcgaagggccttgccgcaaagtgtgtaacggaataggtattggtgaatttaaaga |
| | | | | ctcactctccataaatgctacgaatattaaacacttcaaaaactgcacctccatcagtggcgatc |
| | | | | tccacatcctgccggtggcatttaggggtgactccttcacacatactcctcctctggatccacag |
| | | | | gaactggatattctgaaaaccgtaaaggaaatcacagggtttttgctgattcaggcttggcctga |
| | | | | aaacaggacggacctccatgcctttgagaacctagaaatcatacgcggcaggaccaagcaacatg |
| | | | | gtcagttttctcttgcagtcgtcagcctgaacataacatccttgggattacgctccctcaaggag |
| | | | | ataagtgatggagatgtgataatttcaggaaacaaaaatttgtgctatgcaaatacaataaactg |
| | | | | gaaaaaactgtttgggacctccggtcagaaaaccaaaattataagcaacagaggtgaaaacagct |
| | | | | gcaaggccacaggccaggtctgccatgccttgtgctcccccgagggctgctggggcccggagccc |
| | | | | agggactgcgtctcttgccggaatgtcagccgaggcagggaatgcgtggacaagtgcaaccttct |
| | | | | ggagggtgagccaagggagtttgtggagaactctgagtgcatacagtgccacccagagtgcctgc |
| | | | | ctcaggccatgaacatcacctgcacaggacggggaccagacaactgtatccagtgtgcccactac |
| | | | | attgacggcccccactgcgtcaagacctgcccggcaggagtcatgggagaaaacaacaccctggt |
| | | | | ctggaagtacgcagacgccggccatgtgtgccacctgtgccatccaaactgcacctacggatgca |
| | | | | ctgggccaggtcttgaaggctgtccaacgaatgggcctaagatcccgtccatcgccactgggatg |
| | | | | gtgggggccctcctcttgctgctggtggtggccctggggatcggcctcttcatgcgaaggcgcca |
| | | | | catcgttcggaagcgcacgctgcggaggctgctgcaggagagggagcttgtggagcctcttacac |
| | | | | ccagtggagaagctcccaaccaagctctcttgaggatcttgaaggaaactgaattcaaaaagatc |
| | | | | aaagtgctgggctccggtgcgttcggcacggtgtataagggactctggatcccagaaggtgagaa |
| | | | | agttaaaattcccgtcgctatcaaggaattaagagaagcaacatctccgaaagccaacaaggaaa |
| | | | | tcctcgatgaagcctacgtgatggccagcgtggacaacccccacgtgtgccgcctgctgggcatc |
| | | | | tgcctcacctccaccgtgcagctcatcacgcagctcatgcccttcggctgcctcctggactatgt |
| | | | | ccgggaacacaaagacaatattggctcccagtacctgctcaactggtgtgtgcagatcgcaaagg |
| | | | | gcatgaactacttggaggaccgtcgcttggtgcaccgcgacctggcagccaggaacgtactggtg |
| | | | | aaaacaccgcagcatgtcaagatcacagattttgggctggccaaactgctgggtgcggaagagaa |
| | | | | agaataccatgcagaaggaggcaaagtgcctatcaagtggatggcattggaatcaattttacaca |
| | | | | gaatctatacccaccagagtgatgtctggagctacggggtgaccgtttgggagttgatgaccttt |
| | | | | ggatccaagccatatgacggaatccctgccagcgagatctcctccatcctggagaaaggagaacg |
| | | | | cctccctcagccacccatatgtaccatcgatgtctacatgatcatggtcaagtgctggatgatag |
| | | | | acgcagatagtcgcccaaagttccgtgagttgatcatcgaattctccaaaatggcccgagacccc |
| | | | | cagcgctaccttgtcattcagggggatgaaagaatgcatttgccaagtcctacagactccaactt |
| | | | | ctaccgtgccctgatggatgaagaagacatggacgacgtggtggatgccgacgagtacctcatcc |
| | | | | cacagcagggcttcttcagcagcccctccacgtcacggactcccctcctgagctctctgagtgca |
| | | | | accagcaacaattccaccgtggcttgcattgatagaaatgggctgcaaagctgtcccatcaagga |
| | | | | agacagcttcttgcagcgatacagctcagaccccacaggcgccttgactgaggacagcatagacg |
| | | | | acaccttcctcccagtgcctgaatacataaaccagtccgttcccaaaaggcccgctggctctgtg |
| | | | | cagaatcctgtctatcacaatcagcctctgaaccccgcgcccagcagagacccacactaccagga |
| | | | | cccccacagcactgcagtgggcaaccccgagtatctcaacactgtccagcccacctgtgtcaaca |
| | | | | gcacattcgacagccctgcccactgggcccagaaaggcagccaccaaattagcctggacaaccct |
| | | | | gactaccagcaggacttctttcccaaggaagccaagccaaatggcatctttaagggctccacagc |
| | | | | tgaaaatgcagaatacctaagggtcgcgccacaaagcagtgaatttattggagca |
| 371 | cynomolgus EGF- | artificial | aa | LEEKKVCQGTSNKLTQLGTFEDHFLSLQRMFNNCEVVLGNLEITYVQRNYDLSFLKTIQEVAGYV |
| | R extracellular | | | LIALNTVERIPLENLQIIRGNMYYENSYALAVLSNYDANKTGLKELPMRNLQEILHGAVRFSNNP |
| | domain with | | | ALCNVESIQWRDIVSSEFLSNMSMDFQNHLGSCQKCDPSCPNGSCWGAGEENCQKLTKIICAQQC |
| | human EGF-R | | | SGRCRGKSPSDCCHNQCAAGCTGPRESDCLVCRKFRDEATCKDTCPPLMLYNPTTYQMDVNPEGK |
| | transmembrane | | | YSFGATCVKKCPRNYVVTDHGSCVRACGADSYEMEEDGVRKCKKCEGPCRKVCNGIGIGEFKDTL |
| | and | | | SINATNIKHFKNCTSISGDLHILPVAFRGDSFTHTPPLDPQELDILKTVKEITGFLLIQAWPENR |
| | intracellular | | | TDLHAFENLEIIRGRTKQHGQFSLAVVSLNITSLGLRSLKEISDGDVIISGNKNLCYANTINWKK |
| | domain | | | LFGTSSQKTKIISNRGENSCKATGQVCHALCSPEGCWGPEPRDCVSCQNVSRGRECVDKCNILEG |
| | | | | EPREFVENSECIQCHPECLPQVMNITCTGRGPDNCIQCAHYIDGPHCVKTCPAGVMGENNTLVWK |
| | | | | YADAGHVCHLCHPNCTYGCTGPGLEGCARNGPKIPSIATGMLGALLLLLVVALGIGLFMRRRHIV |
| | | | | RKRTLRRLLQERELVEPLTPSGEAPNQALLRILKETEFKKIKVLGSGAFGTVYKGLWIPEGEKVK |
| | | | | IPVAIKELREATSPKANKEILDEAYVMASVDNPHVCRLLGICLTSTVQLITQLMPFGCLLDYVRE |
| | | | | HKDNIGSQYLLNWCVQIAKGMNYLEDRRLVHRDLAARNVLVKTPQHVKITDFGLAKLLGAEEKEY |
| | | | | HAEGGKVPIKWMALESILHRIYTHQSDVWSYGVTVWELMTFGSKPYDGIPASEISSILEKGERLP |
| | | | | QPPICTIDVYMIMVKCWMIDADSRPKFRELIIEFSKMARDPQRYLVIQGDERMHLPSPTDSNFYR |
| | | | | ALMDEEDMDDVVDADEYLIPQQGFFSSPSTSRTPLLSSLSATSNNSTVACIDRNGLQSCPIKEDS |
| | | | | FLQRYSSDPTGALTEDSIDDTFLPVPEYINQSVPKRPAGSVQNPVYHNQPLNPAPSRDPHYQDPH |
| | | | | STAVGNPEYLNTVQPTCVNSTFDSPAHWAQKGSHQISLDNPDYQQDFFPKEAKPNGIFKGSTAEN |
| | | | | AEYLRVAPQSSEFIGA |
| 372 | cynomolgus EGF- | artificial | cDNA | atgcgaccctccgggacggccggggcagcgctcctggcgctgctggctgcgctctgcccggcgag |
| | R extracellular | | | tcgggctctggaggaaaagaaagtttgccaaggcacgagtaacaaactcacgcagttgggcactt |
| | domain with | | | ttgaagatcattttctcagcctccagaggatgttcaataactgtgaggtggtccttgggaatttg |
| | human EGF-R | | | gaaattacctacgtgcagaggaattatgatctttccttcttaaagaccatccaggaggtggctgg |
| | transmembrane | | | ttatgtcctcatcgccctcaacacagtggagcggattcctttggaaaacctgcagatcatcagag |
| | and | | | gaaacatgtactatgaaaattcctatgccttagcagtcttatctaactatgatgcaaataaaacc |
| | intracellular | | | ggactgaaggagctgcccatgagaaacttacaggaaatcctgcatggcgccgtgcggttcagcaa |
| | domain | | | caaccctgccctgtgcaacgtggagagcatccagtggcgggacatagtcagcagcgagtttctca |
| | | | | gcaacatgtcgatggacttccagaaccacctgggcagctgccaaaagtgtgatccaagctgtccc |
| | | | | aatgggagctgctggggtgcaggagaggagaactgccagaaactgaccaaaatcatctgtgccca |
| | | | | gcagtgctccgggcgctgccgcggcaagtcccccagtgactgctgccacaaccagtgtgccgcgg |
| | | | | gctgcacgggcccccgggagagcgactgcctggtctgccgcaaattccgagacgaagccacgtgc |
| | | | | aaggacacctgccccccactcatgctctacaaccccaccacataccagatggatgtgaaccccga |
| | | | | gggcaaatacagctttggtgccacctgcgtgaagaagtgtccccgtaattatgtggtgacagatc |
| | | | | acggctcgtgcgtccgagcctgcggggccgacagctatgagatggaggaagacggcgtccgcaag |
| | | | | tgtaagaagtgcgaagggccttgccgcaaagtgtgtaatggaataggtattggtgaatttaaaga |
| | | | | cacactctccataaatgctacaaastattaaacacttcaaaaactgcacctccatcagtggcgatc |
| | | | | tccacatcctgccggtggcatttaggggtgactccttcacacacactccgcctctggatccacag |
| | | | | gaactggatattctnaaaaccgtaaaggaaatcacagggtttttgctgattcaggcttggcctga |
| | | | | aaacaggacggacctccatgcttttgagaacctagaaatcatacgtggcaggaccaagcaacacg |
| | | | | gtcagttttctcttgcggtcgtcagcctgaacataacatccttgggattacgctccctcaaggag |
| | | | | ataagcgatggagatgtgataatttcaggaaacaaaaatttgtgctatgcaaatacaataaactg |
| | | | | gaaaaaactgtttgggacctccagtcagaaaaccaaaattataagcaacagaggtgaaaacagct |
| | | | | gcaaggccacgggccaggtctgccatgccttgtgctcccccgagggctgctggggcccngagccc |
| | | | | agggactgcgtctcctgccagaatgtcagccgaggcagagaatgcgtggacaagtgcaacatcct |
| | | | | ggagggcgagccaagggagtttgtggagaactctgagtgcatacagtgccacccagaatgcctgc |
| | | | | cccaggtcatgaacatcacctgcacaggacggggaccagacaactgtatccagtgtgcccactac |
| | | | | attgacggcccccactgcgtcaagacctgcccagcaggagtcatgggagaaaacaacaccctggt |
| | | | | ctggaagtacgcagacgccggccacgtgtgccacctgtgccatccaaactgcacctacggatgca |
| | | | | ctgggccaggtcttgaaggctgtgcaaggaacgggcctaagatcccatccatcgccactggcatg |
| | | | | ctgggggccctcctcttgctgctggtggtggccctggggatcggcctcttcatgcgaaggcgcca |
| | | | | catcgttcggaagcgcacgctgcggaggctgctgcaggagagggagcttgtggagcctcttacac |
| | | | | ccagtggagaagctcccaaccaagctctcttgaggatcttgaaggaaactgaattcaaaaagatc |
| | | | | aaagtgctgggctccggtgcgttcggcacggtgtataagggactctggatcccagaaggtgagaa |
| | | | | agttaaaattcccgtcgctatcaaggaattaagagaagcaacatctccgaaagccaacaaggaaa |
| | | | | tcctcgatgaagcctacgtgatggccagcgtggacaacccccacgtgtgccgcctgctgggcatc |
| | | | | tgcctcacctccaccgtgcagctcatcacgcagctcatgcccttcggctgcctcctggactatgt |
| | | | | ccgggaacacaaagacaatattggctcccagtacctgctcaactggtgtgtgcagatcgcaaagg |
| | | | | gcatgaactacttggaggaccgtcgcttggtgcaccgcgacctggcagccaggaacgtactggtg |
| | | | | aaaacaccgcagcatgtcaagatcacagattttgggctggccaaactgctgggtgcggaagagaa |
| | | | | agaataccatgcagaaggaggcaaagtgcctatcaagtggatggcattggaatcaattttacaca |
| | | | | gaatctatacccaccagagtgatgtctggagctacggggtgaccgtttgggagttgatgaccttt |
| | | | | ggatccaagccatatgacggaatccctgccagcgagatctcctccatcctggagaaaggagaacg |
| | | | | cctccctcagccacccatatgtaccatcgatgtctacatgatcatggtcaagtgctggatgatag |
| | | | | acgcagatagtcgcccaaagttccgtgagttgatcatcgaattctccaaaatggcccgagacccc |
| | | | | cagcgctaccttgtcattcagggggatgaaagaatgcatttgccaagtcctacagactccaactt |
| | | | | ctaccgtgccctgatggatgaagaagacatggacgacgtggtggatgccgacgagtacctcatcc |
| | | | | cacagcagggcttcttcagcagcccctccacgtcacggactcccctcctgagctctctgagtgca |
| | | | | accagcaacaattccaccgtggcttgcattgatagaaatgggctgcaaagctgtcccatcaagga |
| | | | | agacagcttcttgcagcgatacagctcagaccccacaggcgccttgactgaggacagcatagacg |
| | | | | acaccttcctcccagtgcctgaatacataaaccagtccgttcccaaaaggcccgctggctctgtg |
| | | | | cagaatcctgtctatcacaatcagcctctgaaccccgcgcccagcagagacccacactaccagga |
| | | | | cccccacagcactgcagtgggcaaccccgagtatctcaacactgtccagcccacctgtgtcaaca |
| | | | | gcacattcgacagccctgcccactgggcccagaaaggcagccaccaaattagcctggacaaccct |
| | | | | gactaccagcaggacttctttcccaaggaagccaagccaaatggcatctttaagggctccacagc |
| | | | | tgaaaatgcagaatacctaagggtcgcgccacaaagcagtgaatttattggagca |
| 373 | c-terminal | | aa | DYKDDDDKSRTRSGSQLDGGLVLFSHRGTLDGGFRFRLSDGEHTSPGHFFRVTAQKQVLLSLKGS |
| | domain | | | QTLTVCPGSVQPLSSQTLRASSSAGTDPQLLLYRVVRGPQLGRLFHAQQDSTGEALVNFTQAEVY |
| | construct of | | | AGNILYEHEMPPEPFWEAHDTLELQLSSPPARDVAATLAVAVSFEAACPQRPSHLWKNKGLWVPE |
| | human MCSP | | | GQRAPITVAALDASNLLASVPSPQRSEHDVLFQVTQFPSRGQLLVSEEPLHAGQPHFLQSQLAAG |
| | | | | QLVYAHGGGGTQQDGFHFRAHLQGPAGASVAGPQTSEAFAITVRDVNERPPQPQASVPLRLTRGS |
| | | | | RAPISRAQLSVVDPDSAPGEIEYEVQRAPHNGFLSLVGGGLGPVTRFTQADVDSGRLAFVANGSS |
| | | | | VAGIFQLSMSDGASPPLPMSLAVDILPSAIEVQLRAPLEVPQALGRSSLSQQQLRVVSDREEPEA |
| | | | | AYRLIQGPQYGHLLVGGRPTSAFSQFQIDQGEVVFAFTNSSSSHDHFRVLALARGVNASAVVNVT |
| | | | | VRALLHVWAGGPWPQGATLRLDPTVLDAGELANRTDSVPRFRLLEGPRHGRVVRVPRARTEPGGS |
| | | | | QLVEQFTQQDLEDGRLGLEVGRPEGRAPGPAGDSLTLELWAQGVPPAVASLDFATEPYNAARPYS |
| | | | | VALLSVPEAARTEAGKPESSTPTGEPGPMASSPEPAVAKGGFLSFLEANMFSVIIPMCLVLLLLA |
| | | | | LILPLLFYLRKRNKTGKHDVQVLTAKPRNGLAGDTETFRKVEPGQAIPLTAVPGQGPPPGGQPDP |
| | | | | ELLQFCRTPNPALKNGQYWV |
| 374 | c-terminal | | cDNA | atgggatggagctgtatcatcctcttcttggtagcaacagctacaggtgtacactccgactacaa |
| | domain | | | agacgatgacgacaagtcccgtacgagatctggatcccaattggacggcgggctcgtgctgttct |
| | construct of | | | cacacagaggaaccctggatggaggcttccgcttccgcctctctgacggcgagcacacttccccc |
| | human MCSP | | | ggacacttcttccgagtgacggcccagaagcaagtgctcctctcgctgaagggcagccagacact |
| | | | | gactgtctgcccagggtccgtccagccactcagcagtcagaccctcagggccagctccagcgcag |
| | | | | gcactgacccccagctcctgctctaccgtgtggtgcggggcccccagctaggccggctgttccac |
| | | | | gcccagcaggacagcacaggggaggccctggtgaacttcactcaggcagaggtctacgctgggaa |
| | | | | tattctgtatgagcatgagatgccccccgagcccttttgggaggcccatgataccctagagctcc |
| | | | | agctgtcctcgccgcctgcccgggacgtggccgccacccttgctgtggctgtgtcttttgaggct |
| | | | | gcctgtccccagcgccccagccacctctggaagaacaaaggtctctgggtccccgagggccagcg |
| | | | | ggccaggatcaccgtggctgctctggatgcctccaatctcttggccagcgttccatcaccccagc |
| | | | | gctcagagcatgatgtgctcttccaggtcacacagttccccagccgcggccagctgttggtgtcc |
| | | | | gaggagcccctccatgctgggcagccccacttcctgcagtcccagctggctgcagggcagctagt |
| | | | | gtatgcccacggcggtgggggcacccagcaggatggcttccactttcgtgcccacctccaggggc |
| | | | | cagcaggggcctccgtggctggaccccaaacctcagaggcctttgccatcacggtgagggatgta |
| | | | | aatgagcggccccctcagccacaggcctctgtcccactccggctcacccgaggctctcgtgcccc |
| | | | | catctcccgggcccagctgagtgtggtggacccagactcagctcctggggagattgagtacgagg |
| | | | | tccagcgggcaccccacaacggcttcctcagcctggtgggtggtggcctggggcccgtgacccgc |
| | | | | ttcacgcaagccgatgtggattcagggcggctggccttcgtggccaacgggagcagcgtggcagg |
| | | | | catcttccagctgagcatgtctgatggggccagcccacccctgcccatgtccctggctgtggaca |
| | | | | tcctaccatccgccatcgaggtgcagctgcgggcacccctggaggtgccccaagctttggggcgc |
| | | | | tcctcactgagccagcagcagctccgggtggtttcagatcgggaggagccagaggcagcataccg |
| | | | | gttgatccagggaccccagtatgggcatctcctggtgggcgggcggcccacctcggccttcagcc |
| | | | | aattccagatagaccagggcgaggtggtctttgccttcaccaactcctcctcctctcatgaccac |
| | | | | ttcagagtcctggcactggctaggggtgtcaatgcatcagccgtagtgaacgtcactgtgagggc |
| | | | | tctgctgcatgtgtgggcaggtgggccatggccccagggtgccaccctgcgcctggaccccaccg |
| | | | | tcctagatgctggcgagctggccaaccgcacagacagtgtgccgcgcttccgcctcctggaggga |
| | | | | ccccggcatggccgcgtggtccgcgtgccccgagccaggacggagcccgggggcagccagctggt |
| | | | | ggagcagttcactcagcaggaccttgaggacgggaggctggggctggaggtgggcaggccagagg |
| | | | | ggagggcccccggccccgcaggtgacagtctcactctggagctgtgggcacagggcgtcccgcct |
| | | | | gctgtggcctccctggactttgccactgagccttacaatgctgcccggccctacagcgtggccct |
| | | | | gctcagtgtccccgaggccgcccggacggaagcagggaagccagagagcagcacccccacaggcg |
| | | | | agccaggccccatggcatccagccctgagcccgctgtggccaagggaggcttcctgagctttcta |
| | | | | gaggccaacatgttcagcgtcatcatccccatgtgcctggtacttctgctcctggcgctcatcct |
| | | | | gcccctgctcttctacctccgaaaacgcaacaagacgggcaagcatgacgtccaggtcctgactg |
| | | | | ccaagccccgcaacggcctggctggtgacaccgagacctttcgcaaggtggagccaggccaggcc |
| | | | | atcccgctcacagctgtgcctggccaggggccccctccaggaggccagcctgacccagagctgct |
| | | | | gcagttctgccggacacccaaccctgcccttaagaatggccagtactgggtg |
| 375 | partial sequence | cynomolgus | aa | PSNGRVVLRAAPGTEVRSFTQAQLDGGLVLFSHRGTLDGGFRFGLSDGEHTSSGHFFRVTAQKQV |
| | of cynomolgus | | | LLSLEGSRTLTVCPGSVQPLSSQTLRASSSAGTDPQLLLYRVVRGPQLGRLFHAQQDSTGEALVN |
| | MCSP | | | FTQAEVYAGNILYEHEMPTEPFWEAHDTLELQLSSPPARDVAATLAVAVSFEAACPQRPSHLWKN |
| | | | | KGLWVPEGQRAKITMAALDASNLLASVPSSQRLEHDVLFQVTQFPSRGQLLVSEEPLHAGQPHFL |
| | | | | QSQLAAGQLVYAHGGGGTQQDGFHFRAHLQGPAGATVAGPQTSEAFAITVRDVNERPPQPQASVP |
| | | | | LRITRGSRAPISRAQLSVVDPDSAPGEIEYEVQRAPHNGFLSLVGGGPGPVNRFTQADVDSGRLA |
| | | | | FVANGSSVAGVFQLSMSDGASPPLPMSLAVDILPSAIEVQLQAPLEVPQALGRSSLSQQQLRVVS |
| | | | | DREEPEAAYRLIQGPKYGHLLVGGQPASAFSQLQIDQGEVVFAFTNFSSSHDHFRVLALARGVNA |
| | | | | SAVVNITVRALLHVWAGGPWPQGATLRLDPTILDAGELANRTGSVPRFRLLEGPRHGRVVRVPRA |
| | | | | RMEPGGSQLVEQFTQQDLEDGRLGLEVGRPEGRAPSPTGDSLTLELWAQGVPPAVASLDFATEPY |
| | | | | NAARPYSVALLSVPEATRTEAGKPESSTPTGEPGPMASSPVPAVAKGGFLGFLEANMFSVIIPXC |
| | | | | LVLLLLALILPLLFYLRKRNKTGKHDVQVLTAKPRNGLAGDTETFRKVEPGQAIPLTAVPGQGPP |
| | | | | PGGQPDPELLQFCRTPNPALKNGQYWV |
| 376 | partial sequence | cynomolgus | cDNA | cccagcaacggacgggtagtgctgcgggcggcgccgggcaccgaggtgcgcagcttcacgcaggc |
| | of cynomolgus | | | ccagctggatggcggactcgtgctgttctcacacagaggaaccctggatggaggcttccgcttcg |
| | MCSP | | | gcctctccgatggcgagcacacttcctctggacacttcttccgagtgacggcccagaagcaagtg |
| | | | | ctcctctcgctggagggcagccggacactgactgtctgcccagggtccgtgcagccactcagcag |
| | | | | tcagaccctcagagccagctccagcgcaggcaccgacccccagctcctgctctaccgtgtggtgc |
| | | | | ggggcccccagctaggccggctgttccatgcccagcaggacagcacaggggaggccctggtgaac |
| | | | | ttcactcaggcagaggtctatgctgggaatattctgtatgagcatgagatgcccaccgagccctt |
| | | | | ctgggaggcccatgataccctagagctccagctgtcctcaccacctgcccgggacgtggctgcca |
| | | | | cccttgctgtggctgtgtcttttgaggctgcctgtccccagcgccccagccacctctggaagaac |
| | | | | aaaggtctctgggtccccgagggccagcgggccaagatcaccatggctgccctggatgcctccaa |
| | | | | cctcttggccagcgttccatcatcccagcgcctagagcatgatgtgctcttccaggtcacgcagt |
| | | | | tccccagccggggccagctattggtgtctgaggagcccctccacgctgggcagccccacttcctg |
| | | | | cagtcccagctggctgcagggcagctagtgtatgcccacggcggtgggggtacccaacaggatgg |
| | | | | cttccactttcgtgcccacctccaggggccagcaggggccaccgtggctggaccccaaacctcag |
| | | | | aggcttttgccatcacggtgcgggatgtaaatgagcggccccctcagccacaggcctctgtccca |
| | | | | ctccggatcacccgaggctctcgagcccccatctcccgggcccagctgagtgtcgtggacccaga |
| | | | | ctcagctcctggggagattgagtatgaggtccagcgggcaccccacaacggcttcctcagcctgg |
| | | | | tgggtggtggcccggggcccgtgaaccgcttcacgcaagccgatgtggattcggggcggctggcc |
| | | | | ttcgtggccaacgggagcagcgtagcaggcgtcttccagctgagcatgtctgatggggccagccc |
| | | | | accgctgcccatgtccctggccgtggacatcctaccatccgccatcgaggtgcagctgcaggcac |
| | | | | ccctggaggtgccccaagctttggggcgctcctcactgagccagcagcagctccgggtggtttca |
| | | | | gatagggaggagccagaggcagcataccgcctcatccagggaccaaagtacgggcatctcctggt |
| | | | | gggtgggcagcccgcctcggccttcagccaactccagatagaccagggcgaggtggtctttgcct |
| | | | | tcaccaacttctcctcctctcatgaccacttcagagtcctggcactggctaggggtgtcaacgca |
| | | | | tcagccgtagtgaacatcactgtgagggctctgctgcacgtgtgggcaggtgggccatggcccca |
| | | | | gggtgctaccctgcgcctggacccaaccatcctagatgctggcgagctggccaaccgcacaggca |
| | | | | gtgtgccccgcttccgcctcctggagggaccccggcatggccgcgtggtccgtgtgccccgagcc |
| | | | | aggatggagcctgggggcagccagctggtggagcagttcactcagcaggaccttgaggatgggag |
| | | | | gctggggctggaggtgggcaggccagagggaagggcccccagccccacaggcgacagtctcactc |
| | | | | tggagctgtgggcacagggcgtcccacctgctgtggcctccctggactttgccactgagccttac |
| | | | | aatgctgcccggccctacagcgtggccctgctcagtgtccccgaggccacccggacggaagcagg |
| | | | | gaagccagagagcagcacccccacaggcgagccaggccccatggcatctagccctgtgcctgctg |
| | | | | tggccaagggaggcttcctgggcttccttgaggccaacatgttcagtgtcatcatccccrtgtgc |
| | | | | ctggtccttctgctcctggcgctcatcttgcccctgctcttctacctccgaaaacgcaacaagac |
| | | | | gggcaagcatgacgtccaggtcctgactgccaagccccgcaatggtctggctggtgacactgaga |
| | | | | cctttcgcaaggtggagccaggccaggccatcccgctcacagctgtgcctggccaggggccccct |
| | | | | ccgggaggccagcctgacccagagctgctgcagttctgccggacacccaaccctgcccttaagaa |
| | | | | tggccagtactgggtg |
| 377 | PCR primer for | artificial | DNA | AGAGTTCTGGGCCTCTGC |
| | CD3ε chain - | | | |
| | forward primer | | | |
| 378 | PCR primer for | artificial | DNA | CGGATGGGCTCATAGTCTG |
| | CD3ε chain - | | | |
| | reverse primer | | | |
| 379 | His6-human | artificial | aa | HHHHHHQDGNEEMGGITQTPYKVSISGTTVILTCPQYPGSEILWQHNDKNIGGDEDDKNIGSDED |
| | CD3ε | | | HLSLKEFSELEQSGYYVCYPRGSKPEDANFYLYLRARVCENCMEMDVMSVATIVIVDICITGGLL |
| | | | | LLVYYWSKNRKAKAKPVTRGAGAGGRQRGQNKERPPPVPNPDYEPIRKGQRDLYSGLNQRRI |
| 380 | His6-human | artificial | cDNA | atgggatggagctgtatcatcctcttcttggtagcaacagctacaggtgtacactcccatcatca |
| | CD3ε | | | ccatcatcatcaagatggtaatgaagaaatgggtggtattacacagacaccatataaagtctcca |
| | | | | tctctggaaccacagtaatattgacatgccctcagtatcctggatctgaaatactatggcaacac |
| | | | | aatgataaaaacataggcggtgatgaggatgataaaaacataggcagtgatgaggatcacctgtc |
| | | | | actgaaggaattttcagaattggagcaaagtggttattatgtctgctaccccagaggaagcaaac |
| | | | | cagaagatgcgaacttttatctctacctgagggcacgcgtgtgtgagaactgcatggagatggat |
| | | | | gtgatgtcggtggccacaattgtcatagtggacatctgcatcactgggggcttgctgctgctggt |
| | | | | ttactactggagcaagaatagaaaggccaaggccaagcctgtgacacgaggagcgggtgctggcg |
| | | | | gcaggcaaaggggacaaaacaaggagaggccaccacctgttcccaacccagactatgagcccatc |
| | | | | cggaaaggccagcgggacctgtattctggcctgaatcagagacgcatc |
| 381 | VH of EGFR | artificial | aa | QVQLQESGPGLVKPSETLSLTCTVSGGSVSSGDYYWTWIRQSPGKGLEWIGHIYYSGNTNYNPSL |
| | | | | KSRLTISIDTSKTQFSLKLSSVTAADTAIYYCVRDRVTGAFDIWGQGTMVTVSS |
| 382 | VH of EGFR | artificial | nt | CAGGTGCAGCTGCAGGAGTCGGGCCCAGGACTGGTGAAGCCTTCGGAGACCCTGTCCCTCACCTG |
| | | | | CACTGTCTCTGGTGGCTCCGTCAGCAGTGGTGATTACTACTGGACCTGGATCCGGCAGTCCCCAG |
| | | | | GGAAGGGACTGGAGTGGATTGGACACATCTATTACAGTGGGAACACCAATTATAACCCCTCCCTC |
| | | | | AAGAGCCGACTCACCATATCAATTGACACGTCCAAGACTCAGTTCTCCCTGAAGCTGAGTTCTGT |
| | | | | GACCGCTGCGGACACGGCCATTTATTACTGTGTGCGAGATCGAGTGACTGGTGCTTTTGATATCT |
| | | | | GGGGCCAAGGGACAATGGTCACCGTCTCTTCC |
| 383 | VL of EGFR | artificial | aa | DIQMTQSPSSLSASVGDRVTITCQASQDISNYLNWYQQKPGKAPKLLIYDASNLETGVPSRFSGS |
| | | | | GSGTDFTFTISSLQPEDIATYFCQHFDHLPLAFGGGTKVEIK |
| 384 | VL of EGFR | artificial | nt | GACATCCAGATGACCCAGTCTCCATCCTCCCTGTCTGCATCTGTCGGAGACAGAGTCACCATCAC |
| | | | | TTGCCAGGCGAGTCAGGACATCAGCAACTATTTAAATTGGTATCAGCAGAAACCAGGGAAAGCCC |
| | | | | CTAAACTCCTGATCTACGATGCATCCAATTTGGAAACAGGGGTCCCATCAAGGTTCAGTGGAAGT |
| | | | | GGATCTGGGACAGATTTTACTTTCACCATCAGCAGCCTGCAGCCTGAAGATATTGCAACATATTT |
| | | | | CTGTCAACACTTTGATCATCTCCCGCTCGCTTTCGGCGGAGGGACCAAGGTGGAGATCAAA |
| 385 | VH-VL of EGFR | artificial | aa | QVQLQESGPGLVKPSETLSLTCTVSGGSVSSGDYYWTWIRQSPGKGLEWIGHIYYSGNTNYNPSL |
| | | | | KSRLTISIDTSKTQFSLKLSSVTAADTAIYYCVRDRVTGAFDIWGQGTMVTVSSGGGGSGGGGSG |
| | | | | GGGSDIQMTQSPSSLSASVGDRVTITCQASQDISNYLNWYQQKPGKAPKLLIYDASNLETGVPSR |
| | | | | FSGSGSGTDFTFTISSLQPEDIATYFCQHFDHLPLAFGGGTKVEIK |
| 386 | VH-VL of EGFR | artificial | nt | CAGGTGCAGCTGCAGGAGTCGGGCCCAGGACTGGTGAAGCCTTCGGAGACCCTGTCCCTCACCTG |
| | | | | CACTGTCTCTGGTGGCTCCGTCAGCAGTGGTGATTACTACTGGACCTGGATCCGGCAGTCCCCAG |
| | | | | GGAAGGGACTGGAGTGGATTGGACACATCTATTACAGTGGGAACACCAATTATAACCCCTCCCTC |
| | | | | AAGAGCCGACTCACCATATCAATTGACACGTCCAAGACTCAGTTCTCCCTGAAGCTGAGTTCTGT |
| | | | | GACCGCTGCGGACACGGCCATTTATTACTGTGTGCGAGATCGAGTGACTGGTGCTTTTGATATCT |
| | | | | GGGGCCAAGGGACAATGGTCACCGTCTCTTCCGGTGGTGGTGGTTCTGGCGGCGGCGGCTCCGGT |
| | | | | GGTGGTGGTTCTGACATCCAGATGACCCAGTCTCCATCCTCCCTGTCTGCATCTGTCGGAGACAG |
| | | | | AGTCACCATCACTTGCCAGGCGAGTCAGGACATCAGCAACTATTTAAATTGGTATCAGCAGAAAC |
| | | | | CAGGGAAAGCCCCTAAACTCCTGATCTACGATGCATCCAATTTGGAAACAGGGGTCCCATCAAGG |
| | | | | TTCAGTGGAAGTGGATCTGGGACAGATTTTACTTTCACCATCAGCAGCCTGCAGCCTGAAGATAT |
| | | | | TGCAACATATTTCTGTCAACACTTTGATCATCTCCCGCTCGCTTTCGGCGGAGGGACCAAGGTGG |
| | | | | AGATCAAA |
| 387 | VL-VH of EGFR | artificial | aa | DIQMTQSPSSLSASVGDRVTITCQASQDISNYLNWYQQKPGKAPKLLIYDASNLETGVPSRFSGS |
| | | | | GSGTDFTFTILSSLQPEDIATYFCQHFDHLPLAFGGGTKVEIKGGGGSGGGGSGGGGSQVQLQESG |
| | | | | PGLVKPSETLSLTCTVSGGSVSSGDYYWTWIRQSPGKGLEWIGHIYYSGNTNYNPSLKSRLTISI |
| | | | | DTSKTQFSLKLSSVTAADTAIYYCVRDRVTGAFDIWGQGTMVTVSS |
| 388 | VL-VH of EGFR | artificial | nt | GACATCCAGATGACCCAGTCTCCATCCTCCCTGTCTGCATCTGTCGGAGACAGAGTCACCATCAC |
| | | | | TTGCCAGGCGAGTCAGGACATCAGCAACTATTTAAATTGGTATCAGCAGAAACCAGGGAAAGCCC |
| | | | | CTAAACTCCTGATCTACGATGCATCCAATTTGGAAACAGGGGTCCCATCAAGGTTCAGTGGAAGT |
| | | | | GGATCTGGGACAGATTTTACTTTCACCATCAGCAGCCTGCAGCCTGAAGATATTGCAACATATTT |
| | | | | CTGTCAACACTTTGATCATCTCCCGCTCGCTTTCGGCGGAGGGACCAAGGTGGAGATCAAAGGTG |
| | | | | GTGGTGGTTCTGGCGGCGGCGGCTCCGGTGGTGGTGGTTCTCAGGTGCAGCTGCAGGAGTCGGGC |
| | | | | CCAGGACTGGTGAAGCCTTCGGAGACCCTGTCCCTCACCTGCACTGTCTCTGGTGGCTCCGTCAG |
| | | | | CAGTGGTGATTACTACTGGACCTGGATCCGGCAGTCCCCAGGGAAGGGACTGGAGTGGATTGGAC |
| | | | | ACATCTATTACAGTGGGAACACCAATTATAACCCCTCCCTCAAGAGCCGACTCACCATATCAATT |
| | | | | GACACGTCCAAGACTCAGTTCTCCCTGAAGCTGAGTTCTGTGACCGCTGCGGACACGGCCATTTA |
| | | | | TTACTGTGTGCGAGATCGAGTGACTGGTGCTTTTGATATCTGGGGCCAAGGGACAATGGTCACCG |
| | | | | TCTCTTCC |
| 389 | EGFR VH-VL × | artificial | aa | QVQLQESGPGLVKPSETLSLTCTVSGGSVSSGDYYWTWIRQSPGKGLEWIGHIYYSGNTNYNPSL |
| | I2C VH VL | | | KSRLTISIDTSKTQFSLKLSSVTAADTAIYYCVRDRVTGAFDIWGQGTMVTVSSGGGGSGGGGSG |
| | | | | GGGSDIQMTQSPSSLSASVGDRVTITCQASQDISNYLNWYQQKPGKAPKLLIYDASNLETGVPSR |
| | | | | FSGSGSGTDFTFTISSLQPEDIATYFCQHFDHLPLAFGGGTKVEIKGGGGSEVQLVESGGGLVQP |
| | | | | GGSLKLSCAASGFTFNKYAMNWVRQAPGKGLEWVARIRSKYNNYATYYADSVKDRFTISRDDSKN |
| | | | | TAYLQMNNLKTEDTAVYYCVRHGNFGNSYISYWAYWGQGTLVTVSSGGGGSGGGGSGGGGSQTVV |
| | | | | TQEPSLTVSPGGTVTLTCGSSTGAVTSGNYPNWVQQKPGQAPRGLIGGTKFLAPGTPARFSGSLL |
| | | | | GGKAALTLSGVQPEDEAEYYCVLWYSNRWVFGGGTKLTVL |
| 390 | EGFR VH-VL × | artificial | nt | CAGGTGCAGCTGCAGGAGTCGGGCCCAGGACTGGTGAAGCCTTCGGAGACCCTGTCCCTCACCTG |
| | I2C VH VL | | | CACTGTCTCTGGTGGCTCCGTCAGCAGTGGTGATTACTACTGGACCTGGATCCGGCAGTCCCCAG |
| | | | | GGAAGGGACTGGAGTGGATTGGACACATCTATTACAGTGGGAACACCAATTATAACCCCTCCCTC |
| | | | | AAGAGCCGACTCACCATATCAATTGACACGTCCAAGACTCAGTTCTCCCTGAAGCTGAGTTCTGT |
| | | | | GACCGCTGCGGACACGGCCATTTATTACTGTGTGCGAGATCGAGTGACTGGTGCTTTTGATATCT |
| | | | | GGGGCCAAGGGACAATGGTCACCGTCTCTTCCGGTGGTGGTGGTTCTGGCGGCGGCGGCTCCGGT |
| | | | | GGTGGTGGTTCTGACATCCAGATGACCCAGTCTCCATCCTCCCTGTCTGCATCTGTCGGAGACAG |
| | | | | AGTCACCATCACTTGCCAGGCGAGTCAGGACATCAGCAACTATTTAAATTGGTATCAGCAGAAAC |
| | | | | CAGGGAAAGCCCCTAAACTCCTGATCTACGATGCATCCAATTTGGAAACAGGGGTCCCATCAAGG |
| | | | | TTCAGTGGAAGTGGATCTGGGACAGATTTTACTTTCACCATCAGCAGCCTGCAGCCTGAAGATAT |
| | | | | TGCAACATATTTCTGTCAACACTTTGATCATCTCCCGCTCGCTTTCGGCGGAGGGACCAAGGTGG |
| | | | | AGATCAAAGGAGGTGGTGGATCCGAGGTGCAGCTGGTCGAGTCTGGAGGAGGATTGGTGCAGCCT |
| | | | | GGAGGGTCATTGAAACTCTCATGTGCAGCCTCTGGATTCACCTTCAATAAGTACGCCATGAACTG |
| | | | | GGTCCGCCAGGCTCCAGGAAAGGGTTTGGAATGGGTTGCTCGCATAAGAAGTAAATATAATAATT |
| | | | | ATGCAACATATTATGCCGATTCAGTGAAAGACAGGTTCACCATCTCCAGAGATGATTCAAAAAAC |
| | | | | ACTGCCTATCTACAAATGAACAACTTGAAGACTGAGGACACTGCCGTGTACTACTGTGTGAGACA |
| | | | | TGGGAACTTCGGTAATAGCTACATATCCTACTGGGCTTACTGGGGCCAAGGGACTCTGGTCACCG |
| | | | | TCTCCTCAGGTGGTGGTGGTTCTGGCGGCGGCGGCTCCGGTGGTGGTGGTTCTCAGACTGTTGTG |
| | | | | ACTCAGGAACCTTCACTCACCGTATCACCTGGTGGAACAGTCACACTCACTTGTGGCTCCTCGAC |
| | | | | TGGGGCTGTTACATCTGGCAACTACCCAAACTGGGTCCAACAAAAACCAGGTCAGGCACCCCGTG |
| | | | | GTCTAATAGGTGGGACTAAGTTCCTCGCCCCCGGTACTCCTGCCAGATTCTCAGGCTCCCTGCTT |
| | | | | GGAGGCAAGGCTGCCCTCACCCTCTCAGGGGTACAGCCAGAGGATGAGGCAGAATATTACTGTGT |
| | | | | TCTATGGTACAGCAACCGCTGGGTGTTCGGTGGAGGAACCAAACTGACTGTCCTA |
| 391 | EGFR VL-VH × | artificial | aa | DIQMTQSPSSLSASVGDRVTITCQASQDISNYLNWYQQKPGKAPKLLIYDASNLETGVPSRFSGS |
| | I2C VH VL | | | GSGTDFTFTISSLQPEDIATYFCQHFDHLPLAFGGGTKVEIKGGGGSGGGGSGGGGSQVQLQESG |
| | | | | PGLVKPSETLSLTCTVSGGSVSSGDYYWTWIRQSPGKGLEWIGHIYYSGNTNYNPSLKSRLTISI |
| | | | | DTSKTQFSLKLSSVTAADTAIYYCVRDRVTGAFDIWGQGTMVTVSSGGGGSEVQLVESGGGLVQP |
| | | | | GGSLKLSCAASGFTFNKYAMNWVRQAPGKGLEWVARIRSKYNNYATYYADSVKDRFTISRDDSKN |
| | | | | TAYLQMNNLKTEDTAVYYCVRHGNFGNSYISYWAYWGQGTLVTVSSGGGGSGGGGSGGGGSQTVV |
| | | | | TQEPSLTVSPGGTVTLTCGSSTGAVTSGNYPNWVQQKPGQAPRGLIGGTKFLAPGTPARFSGSLL |
| | | | | GGKAALTLSGVQPEDEAEYYCVLWYSNRWVFGGGTKLTVL |
| 392 | EGFR VL-VH × | artificial | nt | GACATCCAGATGACCCAGTCTCCATCCTCCCTGTCTGCATCTGTCGGAGACAGAGTCACCATCAC |
| | I2C VH VL | | | TTGCCAGGCGAGTCAGGACATCAGCAACTATTTAAATTGGTATCAGCAGAAACCAGGGAAAGCCC |
| | | | | CTAAACTCCTGATCTACGATGCATCCAATTTGGAAACAGGGGTCCCATCAAGGTTCAGTGGAAGT |
| | | | | GGATCTGGGACAGATTTTACTTTCACCATCAGCAGCCTGCAGCCTGAAGATATTGCAACATATTT |
| | | | | CTGTCAACACTTTGATCATCTCCCGCTCGCTTTCGGCGGAGGGACCAAGGTGGAGATCAAAGGTG |
| | | | | GTGGTGGTTCTGGCGGCGGCGGCTCCGGTGGTGGTGGTTCTCAGGTGCAGCTGCAGGAGTCGGGC |
| | | | | CCAGGACTGGTGAAGCCTTCGGAGACCCTGTCCCTCACCTGCACTGTCTCTGGTGGCTCCGTCAG |
| | | | | CAGTGGTGATTACTACTGGACCTGGATCCGGCAGTCCCCAGGGAAGGGACTGGAGTGGATTGGAC |
| | | | | ACATCTATTACAGTGGGAACACCAATTATAACCCCTCCCTCAAGAGCCGACTCACCATATCAATT |
| | | | | GACACGTCCAAGACTCAGTTCTCCCTGAAGCTGAGTTCTGTGACCGCTGCGGACACGGCCATTTA |
| | | | | TTACTGTGTGCGAGATCGAGTGACTGGTGCTTTTGATATCTGGGGCCAAGGGACAATGGTCACCG |
| | | | | TCTCTTCCGGAGGTGGTGGATCCGAGGTGCAGCTGGTCGAGTCTGGAGGAGGATTGGTGCAGCCT |
| | | | | GGAGGGTCATTGAAACTCTCATGTGCAGCCTCTGGATTCACCTTCAATAAGTACGCCATGAACTG |
| | | | | GGTCCGCCAGGCTCCAGGAAAGGGTTTGGAATGGGTTGCTCGCATAAGAAGTAAATATAATAATT |
| | | | | ATGCAACATATTATGCCGATTCAGTGAAAGACAGGTTCACCATCTCCAGAGATGATTCAAAAAAC |
| | | | | ACTGCCTATCTACAAATGAACAACTTGAAGACTGAGGACACTGCCGTGTACTACTGTGTGAGACA |
| | | | | TGGGAACTTCGGTAATAGCTACATATCCTACTGGGCTTACTGGGGCCAAGGGACTCTGGTCACCG |
| | | | | TCTCCTCAGGTGGTGGTGGTTCTGGCGGCGGCGGCTCCGGTGGTGGTGGTTCTCAGACTGTTGTG |
| | | | | ACTCAGGAACCTTCACTCACCGTATCACCTGGTGGAACAGTCACACTCACTTGTGGCTCCTCGAC |
| | | | | TGGGGCTGTTACATCTGGCAACTACCCAAACTGGGTCCAACAAAAACCAGGTCAGGCACCCCGTG |
| | | | | GTCTAATAGGTGGGACTAAGTTCCTCGCCCCCGGTACTCCTGCCAGATTCTCAGGCTCCCTGCTT |
| | | | | GGAGGCAAGGCTGCCCTCACCCTCTCAGGGGTACAGCCAGAGGATGAGGCAGAATATTACTGTGT |
| | | | | TCTATGGTACAGCAACCGCTGGGTGTTCGGTGGAGGAACCAAACTGACTGTCCTA |
| 393 | EGFR VH-VL × | artificial | aa | QVQLQESGPGLVKPSETLSLTCTVSGGSVSSGDYYWTWIRQSPGKGLEWIGHIYYSGNTNYNPSL |
| | F12Q VH VL | | | KSRLTISIDTSKTQFSLKLSSVTAADTAIYYCVRDRVTGAFDIWGQGTMVTVSSGGGGSGGGGSG |
| | | | | GGGSDIQMTQSPSSLSASVGDRVTITCQASQDISNYLNWYQQKPGKAPKLLIYDASNLETGVPSR |
| | | | | FSGSGSGTDFTFTISSLQPEDIATYFCQHFDHLPLAFGGGTKVEIKGGGGSEVQLVESGGGLVQP |
| | | | | GGSLKLSCAASGFTFNSYAMNWVRQAPGKGLEWVARIRSKYNNYATYYADSVKGRFTISRDDSKN |
| | | | | TAYLQMNNLKTEDTAVYYCVRHGNFGNSYVSWWAYWGQGTLVTVSSGGGGSGGGGSGGGGSQTVV |
| | | | | TQEPSLTVSPGGTVTLTCGSSTGAVTSGNYPNWVQQKPGQAPRGLIGGTKFLAPGTPARFSGSLL |
| | | | | GGKAALTLSGVQPEDEAEYYCVLWYSNRWVFGGGTKLTVL |
| 394 | EGFR VH-VL × | artificial | nt | CAGGTGCAGCTGCAGGAGTCGGGCCCAGGACTGGTGAAGCCTTCGGAGACCCTGTCCCTCACCTG |
| | F12Q VH VL | | | CACTGTCTCTGGTGGCTCCGTCAGCAGTGGTGATTACTACTGGACCTGGATCCGGCAGTCCCCAG |
| | | | | GGAAGGGACTGGAGTGGATTGGACACATCTATTACAGTGGGAACACCAATTATAACCCCTCCCTC |
| | | | | AAGAGCCGACTCACCATATCAATTGACACGTCCAAGACTCAGTTCTCCCTGAAGCTGAGTTCTGT |
| | | | | GACCGCTGCGGACACGGCCATTTATTACTGTGTGCGAGATCGAGTGACTGGTGCTTTTGATATCT |
| | | | | GGGGCCAAGGGACAATGGTCACCGTCTCTTCCGGTGGTGGTGGTTCTGGCGGCGGCGGCTCCGGT |
| | | | | GGTGGTGGTTCTGACATCCAGATGACCCAGTCTCCATCCTCCCTGTCTGCATCTGTCGGAGACAG |
| | | | | AGTCACCATCACTTGCCAGGCGAGTCAGGACATCAGCAACTATTTAAATTGGTATCAGCAGAAAC |
| | | | | CAGGGAAAGCCCCTAAACTCCTGATCTACGATGCATCCAATTTGGAAACAGGGGTCCCATCAAGG |
| | | | | TTCAGTGGAAGTGGATCTGGGACAGATTTTACTTTCACCATCAGCAGCCTGCAGCCTGAAGATAT |
| | | | | TGCAACATATTTCTGTCAACACTTTGATCATCTCCCGCTCGCTTTCGGCGGAGGGACCAAGGTGG |
| | | | | AGATCAAAGGAGGTGGTGGATCCGAGGTGCAGCTGGTCGAGTCTGGAGGAGGATTGGTGCAGCCT |
| | | | | GGAGGGTCATTGAAACTCTCATGTGCAGCCTCTGGATTCACCTTCAATAGCTACGCCATGAACTG |
| | | | | GGTCCGCCAGGCTCCAGGAAAGGGTTTGGAATGGGTTGCTCGCATAAGAAGTAAATATAATAATT |
| | | | | ATGCAACATATTATGCCGATTCAGTGAAAGGCAGGTTCACCATCTCCAGAGATGATTCAAAAAAC |
| | | | | ACTGCCTATCTACAAATGAACAACTTGAAAACTGAGGACACTGCCGTGTACTACTGTGTGAGACA |
| | | | | TGGGAACTTCGGTAATAGCTACGTTTCCTGGTGGGCTTACTGGGGCCAAGGGACTCTGGTCACCG |
| | | | | TCTCCTCAGGTGGTGGTGGTTCTGGCGGCGGCGGCTCCGGTGGTGGTGGTTCTCAGACTGTTGTG |
| | | | | ACTCAGGAACCTTCACTCACCGTATCACCTGGTGGAACAGTCACACTCACTTGTGGCTCCTCGAC |
| | | | | TGGGGCTGTTACATCTGGCAACTACCCAAACTGGGTCCAACAAAAACCAGGTCAGGCACCCCGTG |
| | | | | GTCTAATAGGTGGGACTAAGTTCCTCGCCCCCGGTACTCCTGCCAGATTCTCAGGCTCCCTGCTT |
| | | | | GGAGGCAAGGCTGCCCTCACCCTCTCAGGGGTACAGCCAGAGGATGAGGCAGAATATTACTGTGT |
| | | | | TCTATGGTACAGCAACCGCTGGGTGTTCGGTGGAGGAACCAAACTGACTGTCCTA |
| 395 | EGFR VL-VH × | artificial | aa | DIQMTQSPSSLSASVGDRVTITCQASQDISNYLNWYQQKPGKAPKLLIYDASNLETGVPSRFSGS |
| | F12Q VH VL | | | GSGTDFTFTISSLQPEDIATYFCQHFDHLPLAFGGGTKVEIKGGGGSGGGGSGGGGSQVQLQESG |
| | | | | PGLVKPSETLSLTCTVSGGSVSSGDYYWTWIRQSPGKGLEWIGHIYYSGNTNYNPSLKSRLTISI |
| | | | | DTSKTQFSLKLSSVTAADTAIYYCVRDRVTGAFDIWGQGTMVTVSSGGGGSEVQLVESGGGLVQP |
| | | | | GGSLKLSCAASGFTFNSYAMNWVRQAPGKGLEWVARIRSKYNNYATYYADSVKGRFTISRDDSKN |
| | | | | TAYLQMNNLKTEDTAVYYCVRHGNFGNSYVSWWAYWGQGTLVTVSSGGGGSGGGGSGGGGSQTVV |
| | | | | TQEPSLTVSPGGTVTLTCGSSTGAVTSGNYPNWVQQKPGQAPRGLIGGTKFLAPGTPARFSGSLL |
| | | | | GGKAALTLSGVQPEDEAEYYCVLWYSNRWVFGGGTKLTVL |
| 396 | EGFR VL-VH × | artificial | nt | GACATCCAGATGACCCAGTCTCCATCCTCCCTGTCTGCATCTGTCGGAGACAGAGTCACCATCAC |
| | F12Q VH VL | | | TTGCCAGGCGAGTCAGGACATCAGCAACTATTTAAATTGGTATCAGCAGAAACCAGGGAAAGCCC |
| | | | | CTAAACTCCTGATCTACGATGCATCCAATTTGGAAACAGGGGTCCCATCAAGGTTCAGTGGAAGT |
| | | | | GGATCTGGGACAGATTTTACTTTCACCATCAGCAGCCTGCAGCCTGAAGATATTGCAACATATTT |
| | | | | CTGTCAACACTTTGATCATCTCCCGCTCGCTTTCGGCGGAGGGACCAAGGTGGAGATCAAAGGTG |
| | | | | GTGGTGGTTCTGGCGGCGGCGGCTCCGGTGGTGGTGGTTCTCAGGTGCAGCTGCAGGAGTCGGGC |
| | | | | CCAGGACTGGTGAAGCCTTCGGAGACCCTGTCCCTCACCTGCACTGTCTCTGGTGGCTCCGTCAG |
| | | | | CAGTGGTGATTACTACTGGACCTGGATCCGGCAGTCCCCAGGGAAGGGACTGGAGTGGATTGGAC |
| | | | | ACATCTATTACAGTGGGAACACCAATTATAACCCCTCCCTCAAGAGCCGACTCACCATATCAATT |
| | | | | GACACGTCCAAGACTCAGTTCTCCCTGAAGCTGAGTTCTGTGACCGCTGCGGACACGGCCATTTA |
| | | | | TTACTGTGTGCGAGATCGAGTGACTGGTGCTTTTGATATCTGGGGCCAAGGGACAATGGTCACCG |
| | | | | TCTCTTCCGGAGGTGGTGGATCCGAGGTGCAGCTGGTCGAGTCTGGAGGAGGATTGGTGCAGCCT |
| | | | | GGAGGGTCATTGAAACTCTCATGTGCAGCCTCTGGATTCACCTTCAATAGCTACGCCATGAACTG |
| | | | | GGTCCGCCAGGCTCCAGGAAAGGGTTTGGAATGGGTTGCTCGCATAAGAAGTAAATATAATAATT |
| | | | | ATGCAACATATTATGCCGATTCAGTGAAAGGCAGGTTCACCATCTCCAGAGATGATTCAAAAAAC |
| | | | | ACTGCCTATCTACAAATGAACAACTTGAAAACTGAGGACACTGCCGTGTACTACTGTGTGAGACA |
| | | | | TGGGAACTTCGGTAATAGCTACGTTTCCTGGTGGGCTTACTGGGGCCAAGGGACTCTGGTCACCG |
| | | | | TCTCCTCAGGTGGTGGTGGTTCTGGCGGCGGCGGCTCCGGTGGTGGTGGTTCTCAGACTGTTGTG |
| | | | | ACTCAGGAACCTTCACTCACCGTATCACCTGGTGGAACAGTCACACTCACTTGTGGCTCCTCGAC |
| | | | | TGGGGCTGTTACATCTGGCAACTACCCAAACTGGGTCCAACAAAAACCAGGTCAGGCACCCCGTG |
| | | | | GTCTAATAGGTGGGACTAAGTTCCTCGCCCCCGGTACTCCTGCCAGATTCTCAGGCTCCCTGCTT |
| | | | | GGAGGCAAGGCTGCCCTCACCCTCTCAGGGGTACAGCCAGAGGATGAGGCAGAATATTACTGTGT |
| | | | | TCTATGGTACAGCAACCGCTGGGTGTTCGGTGGAGGAACCAAACTGACTGTCCTA |
| 397 | EGFR VH-VL × | artificial | aa | QVQLQESGPGLVKPSETLSLTCTVSGGSVSSGDYYWTWIRQSPGKGLEWIGHIYYSGNTNYNPSL |
| | H2C VH VL | | | KSRLTISIDTSKTQFSLKLSSVTAADTAIYYCVRDRVTGAFDIWGQGTMVTVSSGGGGSGGGGSG |
| | | | | GGGSDIQMTQSPSSLSASVGDRVTITCQASQDISNYLNWYQQKPGKAPKLLIYDASNLETGVPSR |
| | | | | FSGSGSGTDFTFTISSLQPEDIATYFCQHFDHLPLAFGGGTKVEIKGGGGSEVQLVESGGGLVQP |
| | | | | GGSLKLSCAASGFTFNKYAMNWVRQAPGKGLEWVARIRSKYNNYATYYADSVKDRFTISRDDSKN |
| | | | | TAYLQMNNLKTEDTAVYYCVRHGNFGNSYISYWAYWGQGTLVTVSSGGGGSGGGGSGGGGSQTVV |
| | | | | TQEPSLTVSPGGTVTLTCGSSTGAVTSGYYPNWVQQKPGQAPRGLIGGTKFLAPGTPARFSGSLL |
| | | | | GGKAALTLSGVQPEDEAEYYCALWYSNRWVFGGGTKLTVL |
| 398 | EGFR VH-VL × | artificial | nt | CAGGTGCAGCTGCAGGAGTCGGGCCCAGGACTGGTGAAGCCTTCGGAGACCCTGTCCCTCACCTG |
| | H2C VH VL | | | CACTGTCTCTGGTGGCTCCGTCAGCAGTGGTGATTACTACTGGACCTGGATCCGGCAGTCCCCAG |
| | | | | GGAAGGGACTGGAGTGGATTGGACACATCTATTACAGTGGGAACACCAATTATAACCCCTCCCTC |
| | | | | AAGAGCCGACTCACCATATCAATTGACACGTCCAAGACTCAGTTCTCCCTGAAGCTGAGTTCTGT |
| | | | | GACCGCTGCGGACACGGCCATTTATTACTGTGTGCGAGATCGAGTGACTGGTGCTTTTGATATCT |
| | | | | GGGGCCAAGGGACAATGGTCACCGTCTCTTCCGGTGGTGGTGGTTCTGGCGGCGGCGGCTCCGGT |
| | | | | GGTGGTGGTTCTGACATCCAGATGACCCAGTCTCCATCCTCCCTGTCTGCATCTGTCGGAGACAG |
| | | | | AGTCACCATCACTTGCCAGGCGAGTCAGGACATCAGCAACTATTTAAATTGGTATCAGCAGAAAC |
| | | | | CAGGGAAAGCCCCTAAACTCCTGATCTACGATGCATCCAATTTGGAAACAGGGGTCCCATCAAGG |
| | | | | TTCAGTGGAAGTGGATCTGGGACAGATTTTACTTTCACCATCAGCAGCCTGCAGCCTGAAGATAT |
| | | | | TGCAACATATTTCTGTCAACACTTTGATCATCTCCCGCTCGCTTTCGGCGGAGGGACCAAGGTGG |
| | | | | AGATCAAAGGAGGTGGTGGATCCGAGGTGCAGCTGGTCGAGTCTGGAGGAGGATTGGTGCAGCCT |
| | | | | GGAGGGTCATTGAAACTCTCATGTGCAGCCTCTGGATTCACCTTCAATAAGTACGCCATGAACTG |
| | | | | GGTCCGCCAGGCTCCAGGAAAGGGTTTGGAATGGGTTGCTCGCATAAGAAGTAAATATAATAATT |
| | | | | ATGCAACATATTATGCCGATTCAGTGAAAGACAGGTTCACCATCTCCAGAGATGATTCAAAAAAC |
| | | | | ACTGCCTATCTACAAATGAACAACTTGAAAACTGAGGACACTGCCGTGTACTACTGTGTGAGACA |
| | | | | TGGGAACTTCGGTAATAGCTACATATCCTACTGGGCTTACTGGGGCCAAGGGACTCTGGTCACCG |
| | | | | TCTCCTCAGGTGGTGGTGGTTCTGGCGGCGGCGGCTCCGGTGGTGGTGGTTCTCAGACTGTTGTG |
| | | | | ACTCAGGAACCTTCACTCACCGTATCACCTGGTGGAACAGTCACACTCACTTGTGGCTCCTCGAC |
| | | | | TGGGGCTGTTACATCTGGCTACTACCCAAACTGGGTCCAACAAAAACCAGGTCAGGCACCCCGTG |
| | | | | GTCTAATAGGTGGGACTAAGTTCCTCGCCCCCGGTACTCCTGCCAGATTCTCAGGCTCCCTGCTT |
| | | | | GGAGGCAAGGCTGCCCTCACCCTCTCAGGGGTACAGCCAGAGGATGAGGCAGAATATTACTGTGC |
| | | | | TCTATGGTACAGCAACCGCTGGGTGTTCGGTGGAGGAACCAAACTGACTGTCCTA |
| 399 | EGFR VL-VH × | artificial | aa | DIQMTQSPSSLSASVGDRVTITCQASQDISNYLNWYQQKPGKAPKLLIYDASNLETGVPSRFSGS |
| | H2C VH VL | | | GSGTDFTFTISSLQPEDIATYFCQHFDHLPLAFGGGTKVEIKGGGGSGGGGSGGGGSQVQLQESG |
| | | | | PGLVKPSETLSLTCTVSGGSVSSGDYYWTWIRQSPGKGLEWIGHIYYSGNTNYNPSLKSRLTISI |
| | | | | DTSKTQFSLKLSSVTAADTAIYYCVRDRVTGAFDIWGQGTMVTVSSGGGGSEVQLVESGGGLVQP |
| | | | | GGSLKLSCAASGFTFNKYAMNWVRQAPGKGLEWVARIRSKYNNYATYYADSVKDRFTISRDDSKN |
| | | | | TAYLQMNNLKTEDTAVYYCVRHGNFGNSYISYWAYWGQGTLVTVSSGGGGSGGGGSGGGGSQTVV |
| | | | | TQEPSLTVSPGGTVTLTCGSSTGAVTSGYYPNWVQQKPGQAPRGLIGGTKFLAPGTPARFSGSLL |
| | | | | GGKAALTLSGVQPEDEAEYYCALWYSNRWVFGGGTKLTVL |
| 400 | EGFR VL-VH × | artificial | nt | GACATCCAGATGACCCAGTCTCCATCCTCCCTGTCTGCATCTGTCGGAGACAGAGTCACCATCAC |
| | H2C VH VL | | | TTGCCAGGCGAGTCAGGACATCAGCAACTATTTAAATTGGTATCAGCAGAAACCAGGGAAAGCCC |
| | | | | CTAAACTCCTGATCTACGATGCATCCAATTTGGAAACAGGGGTCCCATCAAGGTTCAGTGGAAGT |
| | | | | GGATCTGGGACAGATTTTACTTTCACCATCAGCAGCCTGCAGCCTGAAGATATTGCAACATATTT |
| | | | | CTGTCAACACTTTGATCATCTCCCGCTCGCTTTCGGCGGAGGGACCAAGGTGGAGATCAAAGGTG |
| | | | | GTGGTGGTTCTGGCGGCGGCGGCTCCGGTGGTGGTGGTTCTCAGGTGCAGCTGCAGGAGTCGGGC |
| | | | | CCAGGACTGGTGAAGCCTTCGGAGACCCTGTCCCTCACCTGCACTGTCTCTGGTGGCTCCGTCAG |
| | | | | CAGTGGTGATTACTACTGGACCTGGATCCGGCAGTCCCCAGGGAAGGGACTGGAGTGGATTGGAC |
| | | | | ACATCTATTACAGTGGGAACACCAATTATAACCCCTCCCTCAAGAGCCGACTCACCATATCAATT |
| | | | | GACACGTCCAAGACTCAGTTCTCCCTGAAGCTGAGTTCTGTGACCGCTGCGGACACGGCCATTTA |
| | | | | TTACTGTGTGCGAGATCGAGTGACTGGTGCTTTTGATATCTGGGGCCAAGGGACAATGGTCACCG |
| | | | | TCTCTTCCGGAGGTGGTGGATCCGAGGTGCAGCTGGTCGAGTCTGGAGGAGGATTGGTGCAGCCT |
| | | | | GGAGGGTCATTGAAACTCTCATGTGCAGCCTCTGGATTCACCTTCAATAAGTACGCCATGAACTG |
| | | | | GGTCCGCCAGGCTCCAGGAAAGGGTTTGGAATGGGTTGCTCGCATAAGAAGTAAATATAATAATT |
| | | | | ATGCAACATATTATGCCGATTCAGTGAAAGACAGGTTCACCATCTCCAGAGATGATTCAAAAAAC |
| | | | | ACTGCCTATCTACAAATGAACAACTTGAAAACTGAGGACACTGCCGTGTACTACTGTGTGAGACA |
| | | | | TGGGAACTTCGGTAATAGCTACATATCCTACTGGGCTTACTGGGGCCAAGGGACTCTGGTCACCG |
| | | | | TCTCCTCAGGTGGTGGTGGTTCTGGCGGCGGCGGCTCCGGTGGTGGTGGTTCTCAGACTGTTGTG |
| | | | | ACTCAGGAACCTTCACTCACCGTATCACCTGGTGGAACAGTCACACTCACTTGTGGCTCCTCGAC |
| | | | | TGGGGCTGTTACATCTGGCTACTACCCAAACTGGGTCCAACAAAAACCAGGTCAGGCACCCCGTG |
| | | | | GTCTAATAGGTGGGACTAAGTTCCTCGCCCCCGGTACTCCTGCCAGATTCTCAGGCTCCCTGCTT |
| | | | | GGAGGCAAGGCTGCCCTCACCCTCTCAGGGGTACAGCCAGAGGATGAGGCAGAATATTACTGTGC |
| | | | | TCTATGGTACAGCAACCGCTGGGTGTTCGGTGGAGGAACCAAACTGACTGTCCTA |
| 401 | VH of EGFR | artificial | aa | QVQLKQSGPGLVQPSQSLSITCTVSGFSLTNYGVHWVRQSPGKGLEWLGVIWSGGNTDYNTPFTS |
| | | | | RLSINKDNSKSQVFFKMNSLQSNDTAIYYCARALTYYDYEFAYWGQGTLVTVSS |
| 402 | VH of EGFR | artificial | nt | CAGGTGCAGCTGAAGCAGTCAGGACCTGGCCTAGTGCAGCCCTCACAGAGCCTGTCCATCACCTG |
| | | | | CACAGTCTCTGGTTTCTCATTAACTAACTATGGAGTACACTGGGTTCGCCAGTCTCCAGGAAAGG |
| | | | | GTCTGGAGTGGCTGGGAGTGATATGGAGTGGTGGAAACACAGACTATAATACACCTTTCACATCC |
| | | | | AGACTGAGCATCAACAAGGACAATTCCAAGAGCCAAGTTTTCTTTAAAATGAACAGTCTGCAATC |
| | | | | TAATGACACAGCCATATATTACTGTGCCAGAGCCCTGACCTATTATGACTACGAGTTCGCCTATT |
| | | | | GGGGTCAGGGAACCCTGGTTACCGTGTCTTCC |
| 403 | VL of EGFR | artificial | aa | DILLTQSPVILSVSPGERVSFSCRASQSIGTNIHWYQQRTNGSPRLLIKYASESISGIPSRFSGS |
| | | | | GSGTDFTLSINSVESEDIADYYCQQNNNWPTTFGAGTKLELK |
| 404 | VL of EGFR | artificial | nt | GACATCTTGCTGACTCAGTCTCCAGTCATCCTGTCTGTGAGTCCAGGAGAAAGAGTCAGTTTCTC |
| | | | | CTGCAGGGCCAGTCAGAGCATTGGCACAAACATACACTGGTATCAGCAAAGAACAAATGGTTCTC |
| | | | | CAAGGCTTCTCATAAAGTATGCTTCTGAGTCTATCTCTGGGATCCCTTCCAGGTTTAGTGGCAGT |
| | | | | GGATCAGGGACAGATTTTACTCTTAGCATCAACAGTGTGGAGTCTGAAGATATTGCAGATTATTA |
| | | | | CTGTCAACAAAATAATAACTGGCCAACCACATTTGGTGCAGGAACAAAGCTGGAACTGAAA |
| 405 | VH-VL of EGFR | artificial | aa | QVQLKQSGPGLVQPSQSLSITCTVSGFSLTNYGVHWVRQSPGKGLEWLGVIWSGGNTDYNTPFTS |
| | | | | RLSINKDNSKSQVFFKMNSLQSNDTAIYYCARALTYYDYEFAYWGQGTLVTVSSGGGGSGGGGSG |
| | | | | GGGSDILLTQSPVILSVSPGERVSFSCRASQSIGTNIHWYQQRTNGSPRLLIKYASESISGIPSR |
| | | | | FSGSGSGTDFTLSINSVESEDIADYYCQQNNNWPTTFGAGTKLELK |
| 406 | VH-VL of EGFR | artificial | nt | CAGGTGCAGCTGAAGCAGTCAGGACCTGGCCTAGTGCAGCCCTCACAGAGCCTGTCCATCACCTG |
| | | | | CACAGTCTCTGGTTTCTCATTAACTAACTATGGAGTACACTGGGTTCGCCAGTCTCCAGGAAAGG |
| | | | | GTCTGGAGTGGCTGGGAGTGATATGGAGTGGTGGAAACACAGACTATAATACACCTTTCACATCC |
| | | | | AGACTGAGCATCAACAAGGACAATTCCAAGAGCCAAGTTTTCTTTAAAATGAACAGTCTGCAATC |
| | | | | TAATGACACAGCCATATATTACTGTGCCAGAGCCCTGACCTATTATGACTACGAGTTCGCCTATT |
| | | | | GGGGTCAGGGAACCCTGGTTACCGTGTCTTCCGGTGGTGGTGGTTCTGGCGGCGGCGGCTCCGGT |
| | | | | GGTGGTGGTTCTGACATCTTGCTGACTCAGTCTCCAGTCATCCTGTCTGTGAGTCCAGGAGAAAG |
| | | | | AGTCAGTTTCTCCTGCAGGGCCAGTCAGAGCATTGGCACAAACATACACTGGTATCAGCAAAGAA |
| | | | | CAAATGGTTCTCCAAGGCTTCTCATAAAGTATGCTTCTGAGTCTATCTCTGGGATCCCTTCCAGG |
| | | | | TTTAGTGGCAGTGGATCAGGGACAGATTTTACTCTTAGCATCAACAGTGTGGAGTCTGAAGATAT |
| | | | | TGCAGATTATTACTGTCAACAAAATAATAACTGGCCAACCACATTTGGTGCAGGAACAAAGCTGG |
| | | | | AACTGAAA |
| 407 | VL-VH of EGFR | artificial | aa | DILLTQSPVILSVSPGERVSFSCRASQSIGTNIHWYQQRTNGSPRLLIKYASESISGIPSRFSGS |
| | | | | GSGTDFTLSINSVESEDIADYYCQQNNNWPTTFGAGTKLELKGGGGSGGGGSGGGGSQVQLKQSG |
| | | | | PGLVQPSQSLSITCTVSGFSLTNYGVHWVRQSPGKGLEWLGVIWSGGNTDYNTPFTSRLSINKDN |
| | | | | SKSQVFFKMNSLQSNDTAIYYCARALTYYDYEFAYWGQGTLVTVSS |
| 408 | VL-VH of EGFR | artificial | nt | GACATCTTGCTGACTCAGTCTCCAGTCATCCTGTCTGTGAGTCCAGGAGAAAGAGTCAGTTTCTC |
| | | | | CTGCAGGGCCAGTCAGAGCATTGGCACAAACATACACTGGTATCAGCAAAGAACAAATGGTTCTC |
| | | | | CAAGGCTTCTCATAAAGTATGCTTCTGAGTCTATCTCTGGGATCCCTTCCAGGTTTAGTGGCAGT |
| | | | | GGATCAGGGACAGATTTTACTCTTAGCATCAACAGTGTGGAGTCTGAAGATATTGCAGATTATTA |
| | | | | CTGTCAACAAAATAATAACTGGCCAACCACATTTGGTGCAGGAACAAAGCTGGAACTGAAAGGTG |
| | | | | GTGGTGGTTCTGGCGGCGGCGGCTCCGGTGGTGGTGGTTCTCAGGTGCAGCTGAAGCAGTCAGGA |
| | | | | CCTGGCCTAGTGCAGCCCTCACAGAGCCTGTCCATCACCTGCACAGTCTCTGGTTTCTCATTAAC |
| | | | | TAACTATGGAGTACACTGGGTTCGCCAGTCTCCAGGAAAGGGTCTGGAGTGGCTGGGAGTGATAT |
| | | | | GGAGTGGTGGAAACACAGACTATAATACACCTTTCACATCCAGACTGAGCATCAACAAGGACAAT |
| | | | | TCCAAGAGCCAAGTTTTCTTTAAAATGAACAGTCTGCAATCTAATGACACAGCCATATATTACTG |
| | | | | TGCCAGAGCCCTGACCTATTATGACTACGAGTTCGCCTATTGGGGTCAGGGAACCCTGGTTACCG |
| | | | | TGTCTTCC |
| 409 | EGFR VH-VL × | artificial | aa | QVQLKQSGPGLVQPSQSLSITCTVSGFSLTNYGVHWVRQSPGKGLEWLGVIWSGGNTDYNTPFTS |
| | I2C VH VL | | | RLSINKDNSKSQVFFKMNSLQSNDTAIYYCARALTYYDYEFAYWGQGTLVTVSSGGGGSGGGGSG |
| | | | | GGGSDILLTQSPVILSVSPGERVSFSCRASQSIGTNIHWYQQRTNGSPRLLIKYASESISGIPSR |
| | | | | FSGSGSGTDFTLSINSVESEDIADYYCQQNNNWPTTFGAGTKLELKGGGGSEVQLVESGGGLVQP |
| | | | | GGSLKLSCAASGFTFNKYAMNWVRQAPGKGLEWVARIRSKYNNYATYYADSVKDRFTISRDDSKN |
| | | | | TAYLQMNNLKTEDTAVYYCVRHGNFGNSYISYWAYWGQGTLVTVSSGGGGSGGGGSGGGGSQTVV |
| | | | | TQEPSLTVSPGGTVTLTCGSSTGAVTSGNYPNWVQQKPGQAPRGLIGGTKFLAPGTPARFSGSLL |
| | | | | GGKAALTLSGVQPEDEAEYYCVLWYSNRWVFGGGTKLTVL |
| 410 | EGFR VH-VL × | artificial | nt | CAGGTGCAGCTGAAGCAGTCAGGACCTGGCCTAGTGCAGCCCTCACAGAGCCTGTCCATCACCTG |
| | I2C VH VL | | | CACAGTCTCTGGTTTCTCATTAACTAACTATGGAGTACACTGGGTTCGCCAGTCTCCAGGAAAGG |
| | | | | GTCTGGAGTGGCTGGGAGTGATATGGAGTGGTGGAAACACAGACTATAATACACCTTTCACATCC |
| | | | | AGACTGAGCATCAACAAGGACAATTCCAAGAGCCAAGTTTTCTTTAAAATGAACAGTCTGCAATC |
| | | | | TAATGACACAGCCATATATTACTGTGCCAGAGCCCTGACCTATTATGACTACGAGTTCGCCTATT |
| | | | | GGGGTCAGGGAACCCTGGTTACCGTGTCTTCCGGTGGTGGTGGTTCTGGCGGCGGCGGCTCCGGT |
| | | | | GGTGGTGGTTCTGACATCTTGCTGACTCAGTCTCCAGTCATCCTGTCTGTGAGTCCAGGAGAAAG |
| | | | | AGTCAGTTTCTCCTGCAGGGCCAGTCAGAGCATTGGCACAAACATACACTGGTATCAGCAAAGAA |
| | | | | CAAATGGTTCTCCAAGGCTTCTCATAAAGTATGCTTCTGAGTCTATCTCTGGGATCCCTTCCAGG |
| | | | | TTTAGTGGCAGTGGATCAGGGACAGATTTTACTCTTAGCATCAACAGTGTGGAGTCTGAAGATAT |
| | | | | TGCAGATTATTACTGTCAACAAAATAATAACTGGCCAACCACATTTGGTGCAGGAACAAAGCTGG |
| | | | | AACTGAAAGGAGGTGGTGGATCCGAGGTGCAGCTGGTCGAGTCTGGAGGAGGATTGGTGCAGCCT |
| | | | | GGAGGGTCATTGAAACTCTCATGTGCAGCCTCTGGATTCACCTTCAATAAGTACGCCATGAACTG |
| | | | | GGTCCGCCAGGCTCCAGGAAAGGGTTTGGAATGGGTTGCTCGCATAAGAAGTAAATATAATAATT |
| | | | | ATGCAACATATTATGCCGATTCAGTGAAAGACAGGTTCACCATCTCCAGAGATGATTCAAAAAAC |
| | | | | ACTGCCTATCTACAAATGAACAACTTGAAGACTGAGGACACTGCCGTGTACTACTGTGTGAGACA |
| | | | | TGGGAACTTCGGTAATAGCTACATATCCTACTGGGCTTACTGGGGCCAAGGGACTCTGGTCACCG |
| | | | | TCTCCTCAGGTGGTGGTGGTTCTGGCGGCGGCGGCTCCGGTGGTGGTGGTTCTCAGACTGTTGTG |
| | | | | ACTCAGGAACCTTCACTCACCGTATCACCTGGTGGAACAGTCACACTCACTTGTGGCTCCTCGAC |
| | | | | TGGGGCTGTTACATCTGGCAACTACCCAAACTGGGTCCAACAAAAACCAGGTCAGGCACCCCGTG |
| | | | | GTCTAATAGGTGGGACTAAGTTCCTCGCCCCCGGTACTCCTGCCAGATTCTCAGGCTCCCTGCTT |
| | | | | GGAGGCAAGGCTGCCCTCACCCTCTCAGGGGTACAGCCAGAGGATGAGGCAGAATATTACTGTGT |
| | | | | TCTATGGTACAGCAACCGCTGGGTGTTCGGTGGAGGAACCAAACTGACTGTCCTA |
| 411 | EGFR VL-VH × | artificial | aa | DILLTQSPVILSVSPGERVSFSCRASQSIGTNIHWYQQRTNGSPRLLIKYASESISGIPSRFSGS |
| | I2C VH VL | | | GSGTDFTLSINSVESEDIADYYCQQNNNWPTTFGAGTKLELKGGGGSGGGGSGGGGSQVQLKQSG |
| | | | | PGLVQPSQSLSITCTVSGFSLTNYGVHWVRQSPGKGLEWLGVIWSGGNTDYNTPFTSRLSINKDN |
| | | | | SKSQVFFKMNSLQSNDTAIYYCARALTYYDYEFAYWGQGTLVTVSSGGGGSEVQLVESGGGLVQP |
| | | | | GGSLKLSCAASGFTFNKYAMNWVRQAPGKGLEWVARIRSKYNNYATYYADSVKDRFTISRDDSKN |
| | | | | TAYLQMNNLKTEDTAVYYCVRHGNFGNSYISYWAYWGQGTLVTVSSGGGGSGGGGSGGGGSQTVV |
| | | | | TQEPSLTVSPGGTVTLTCGSSTGAVTSGNYPNWVQQKPGQAPRGLIGGTKFLAPGTPARFSGSLL |
| | | | | GGKAALTLSGVQPEDEAEYYCVLWYSNRWVFGGGTKLTVL |
| 412 | EGFR VL-VH × | artificial | nt | GACATCTTGCTGACTCAGTCTCCAGTCATCCTGTCTGTGAGTCCAGGAGAAAGAGTCAGTTTCTC |
| | I2C VH VL | | | CTGCAGGGCCAGTCAGAGCATTGGCACAAACATACACTGGTATCAGCAAAGAACAAATGGTTCTC |
| | | | | CAAGGCTTCTCATAAAGTATGCTTCTGAGTCTATCTCTGGGATCCCTTCCAGGTTTAGTGGCAGT |
| | | | | GGATCAGGGACAGATTTTACTCTTAGCATCAACAGTGTGGAGTCTGAAGATATTGCAGATTATTA |
| | | | | CTGTCAACAAAATAATAACTGGCCAACCACATTTGGTGCAGGAACAAAGCTGGAACTGAAAGGTG |
| | | | | GTGGTGGTTCTGGCGGCGGCGGCTCCGGTGGTGGTGGTTCTCAGGTGCAGCTGAAGCAGTCAGGA |
| | | | | CCTGGCCTAGTGCAGCCCTCACAGAGCCTGTCCATCACCTGCACAGTCTCTGGTTTCTCATTAAC |
| | | | | TAACTATGGAGTACACTGGGTTCGCCAGTCTCCAGGAAAGGGTCTGGAGTGGCTGGGAGTGATAT |
| | | | | GGAGTGGTGGAAACACAGACTATAATACACCTTTCACATCCAGACTGAGCATCAACAAGGACAAT |
| | | | | TCCAAGAGCCAAGTTTTCTTTAAAATGAACAGTCTGCAATCTAATGACACAGCCATATATTACTG |
| | | | | TGCCAGAGCCCTGACCTATTATGACTACGAGTTCGCCTATTGGGGTCAGGGAACCCTGGTTACCG |
| | | | | TGTCTTCCGGAGGTGGTGGATCCGAGGTGCAGCTGGTCGAGTCTGGAGGAGGATTGGTGCAGCCT |
| | | | | GGAGGGTCATTGAAACTCTCATGTGCAGCCTCTGGATTCACCTTCAATAAGTACGCCATGAACTG |
| | | | | GGTCCGCCAGGCTCCAGGAAAGGGTTTGGAATGGGTTGCTCGCATAAGAAGTAAATATAATAATT |
| | | | | ATGCAACATATTATGCCGATTCAGTGAAAGACAGGTTCACCATCTCCAGAGATGATTCAAAAAAC |
| | | | | ACTGCCTATCTACAAATGAACAACTTGAAGACTGAGGACACTGCCGTGTACTACTGTGTGAGACA |
| | | | | TGGGAACTTCGGTAATAGCTACATATCCTACTGGGCTTACTGGGGCCAAGGGACTCTGGTCACCG |
| | | | | TCTCCTCAGGTGGTGGTGGTTCTGGCGGCGGCGGCTCCGGTGGTGGTGGTTCTCAGACTGTTGTG |
| | | | | ACTCAGGAACCTTCACTCACCGTATCACCTGGTGGAACAGTCACACTCACTTGTGGCTCCTCGAC |
| | | | | TGGGGCTGTTACATCTGGCAACTACCCAAACTGGGTCCAACAAAAACCAGGTCAGGCACCCCGTG |
| | | | | GTCTAATAGGTGGGACTAAGTTCCTCGCCCCCGGTACTCCTGCCAGATTCTCAGGCTCCCTGCTT |
| | | | | GGAGGCAAGGCTGCCCTCACCCTCTCAGGGGTACAGCCAGAGGATGAGGCAGAATATTACTGTGT |
| | | | | TCTATGGTACAGCAACCGCTGGGTGTTCGGTGGAGGAACCAAACTGACTGTCCTA |
| 413 | EGFR VH-VL × | artificial | aa | QVQLKQSGPGLVQPSQSLSITCTVSGFSLTNYGVHWVRQSPGKGLEWLGVIWSGGNTDYNTPFTS |
| | F12Q VH VL | | | RLSINKDNSKSQVFFKMNSLQSNDTAIYYCARALTYYDYEFAYWGQGTLVTVSSGGGGSGGGGSG |
| | | | | GGGSDILLTQSPVILSVSPGERVSFSCRASQSIGTNIHWYQQRTNGSPRLLIKYASESISGIPSR |
| | | | | FSGSGSGTDFTLSINSVESEDIADYYCQQNNNWPTTFGAGTKLELKGGGGSEVQLVESGGGLVQP |
| | | | | GGSLKLSCAASGFTFNSYAMNWVRQAPGKGLEWVARIRSKYNNYATYYADSVKGRFTISRDDSKN |
| | | | | TAYLQMNNLKTEDTAVYYCVRHGNFGNSYVSWWAYWGQGTLVTVSSGGGGSGGGGSGGGGSQTVV |
| | | | | TQEPSLTVSPGGTVTLTCGSSTGAVTSGNYPNWVQQKPGQAPRGLIGGTKFLAPGTPARFSGSLL |
| | | | | GGKAALTLSGVQPEDEAEYYCVLWYSNRWVFGGGTKLTVL |
| 414 | EGFR VH-VL × | artificial | nt | CAGGTGCAGCTGAAGCAGTCAGGACCTGGCCTAGTGCAGCCCTCACAGAGCCTGTCCATCACCTG |
| | F12Q VH VL | | | CACAGTCTCTGGTTTCTCATTAACTAACTATGGAGTACACTGGGTTCGCCAGTCTCCAGGAAAGG |
| | | | | GTCTGGAGTGGCTGGGAGTGATATGGAGTGGTGGAAACACAGACTATAATACACCTTTCACATCC |
| | | | | AGACTGAGCATCAACAAGGACAATTCCAAGAGCCAAGTTTTCTTTAAAATGAACAGTCTGCAATC |
| | | | | TAATGACACAGCCATATATTACTGTGCCAGAGCCCTGACCTATTATGACTACGAGTTCGCCTATT |
| | | | | GGGGTCAGGGAACCCTGGTTACCGTGTCTTCCGGTGGTGGTGGTTCTGGCGGCGGCGGCTCCGGT |
| | | | | GGTGGTGGTTCTGACATCTTGCTGACTCAGTCTCCAGTCATCCTGTCTGTGAGTCCAGGAGAAAG |
| | | | | AGTCAGTTTCTCCTGCAGGGCCAGTCAGAGCATTGGCACAAACATACACTGGTATCAGCAAAGAA |
| | | | | CAAATGGTTCTCCAAGGCTTCTCATAAAGTATGCTTCTGAGTCTATCTCTGGGATCCCTTCCAGG |
| | | | | TTTAGTGGCAGTGGATCAGGGACAGATTTTACTCTTAGCATCAACAGTGTGGAGTCTGAAGATAT |
| | | | | TGCAGATTATTACTGTCAACAAAATAATAACTGGCCAACCACATTTGGTGCAGGAACAAAGCTGG |
| | | | | AACTGAAAGGAGGTGGTGGATCCGAGGTGCAGCTGGTCGAGTCTGGAGGAGGATTGGTGCAGCCT |
| | | | | GGAGGGTCATTGAAACTCTCATGTGCAGCCTCTGGATTCACCTTCAATAGCTACGCCATGAACTG |
| | | | | GGTCCGCCAGGCTCCAGGAAAGGGTTTGGAATGGGTTGCTCGCATAAGAAGTAAATATAATAATT |
| | | | | ATGCAACATATTATGCCGATTCAGTGAAAGGCAGGTTCACCATCTCCAGAGATGATTCAAAAAAC |
| | | | | ACTGCCTATCTACAAATGAACAACTTGAAAACTGAGGACACTGCCGTGTACTACTGTGTGAGACA |
| | | | | TGGGAACTTCGGTAATAGCTACGTTTCCTGGTGGGCTTACTGGGGCCAAGGGACTCTGGTCACCG |
| | | | | TCTCCTCAGGTGGTGGTGGTTCTGGCGGCGGCGGCTCCGGTGGTGGTGGTTCTCAGACTGTTGTG |
| | | | | ACTCAGGAACCTTCACTCACCGTATCACCTGGTGGAACAGTCACACTCACTTGTGGCTCCTCGAC |
| | | | | TGGGGCTGTTACATCTGGCAACTACCCAAACTGGGTCCAACAAAAACCAGGTCAGGCACCCCGTG |
| | | | | GTCTAATAGGTGGGACTAAGTTCCTCGCCCCCGGTACTCCTGCCAGATTCTCAGGCTCCCTGCTT |
| | | | | GGAGGCAAGGCTGCCCTCACCCTCTCAGGGGTACAGCCAGAGGATGAGGCAGAATATTACTGTGT |
| | | | | TCTATGGTACAGCAACCGCTGGGTGTTCGGTGGAGGAACCAAACTGACTGTCCTA |
| 415 | EGFR VL-VH × | artificial | aa | DILLTQSPVILSVSPGERVSFSCRASQSIGTNIHWYQQRTNGSPRLLIKYASESISGIPSRFSGS |
| | F12Q VH VL | | | GSGTDFTLSINSVESEDIADYYCQQNNNWPTTFGAGTKLELKGGGGSGGGGSGGGGSQVQLKQSG |
| | | | | PGLVQPSQSLSITCTVSGFSLTNYGVHWVRQSPGKGLEWLGVIWSGGNTDYNTPFTSRLSINKDN |
| | | | | SKSQVFFKMNSLQSNDTAIYYCARALTYYDYEFAYWGQGTLVTVSSGGGGSEVQLVESGGGLVQP |
| | | | | GGSLKLSCAASGFTFNSYAMNWVRQAPGKGLEWVARIRSKYNNYATYYADSVKGRFTISRDDSKN |
| | | | | TAYLQMNNLKTEDTAVYYCVRHGNFGNSYVSWWAYWGQGTLVTVSSGGGGSGGGGSGGGGSQTVV |
| | | | | TQEPSLTVSPGGTVTLTCGSSTGAVTSGNYPNWVQQKPGQAPRGLIGGTKFLAPGTPARFSGSLL |
| | | | | GGKAALTLSGVQPEDEAEYYCVLWYSNRWVFGGGTKLTVL |
| 416 | EGFR VL-VH × | artificial | nt | GACATCTTGCTGACTCAGTCTCCAGTCATCCTGTCTGTGAGTCCAGGAGAAAGAGTCAGTTTCTC |
| | F12Q VH VL | | | CTGCAGGGCCAGTCAGAGCATTGGCACAAACATACACTGGTATCAGCAAAGAACAAATGGTTCTC |
| | | | | CAAGGCTTCTCATAAAGTATGCTTCTGAGTCTATCTCTGGGATCCCTTCCAGGTTTAGTGGCAGT |
| | | | | GGATCAGGGACAGATTTTACTCTTAGCATCAACAGTGTGGAGTCTGAAGATATTGCAGATTATTA |
| | | | | CTGTCAACAAAATAATAACTGGCCAACCACATTTGGTGCAGGAACAAAGCTGGAACTGAAAGGTG |
| | | | | GTGGTGGTTCTGGCGGCGGCGGCTCCGGTGGTGGTGGTTCTCAGGTGCAGCTGAAGCAGTCAGGA |
| | | | | CCTGGCCTAGTGCAGCCCTCACAGAGCCTGTCCATCACCTGCACAGTCTCTGGTTTCTCATTAAC |
| | | | | TAACTATGGAGTACACTGGGTTCGCCAGTCTCCAGGAAAGGGTCTGGAGTGGCTGGGAGTGATAT |
| | | | | GGAGTGGTGGAAACACAGACTATAATACACCTTTCACATCCAGACTGAGCATCAACAAGGACAAT |
| | | | | TCCAAGAGCCAAGTTTTCTTTAAAATGAACAGTCTGCAATCTAATGACACAGCCATATATTACTG |
| | | | | TGCCAGAGCCCTGACCTATTATGACTACGAGTTCGCCTATTGGGGTCAGGGAACCCTGGTTACCG |
| | | | | TGTCTTCCGGAGGTGGTGGATCCGAGGTGCAGCTGGTCGAGTCTGGAGGAGGATTGGTGGAGCCT |
| | | | | GGAGGGTCATTGAAACTCTCATGTGCAGCCTCTGGATTCACCTTCAATAGCTACGCCATGAACTG |
| | | | | GGTCCGCCAGGCTCCAGGAAAGGGTTTGGAATGGGTTGCTCGCATAAGAAGTAAATATAATAATT |
| | | | | ATGCAACATATTATGCCGATTCAGTGAAAGGCAGGTTCACCATCTCCAGAGATGATTCAAAAAAC |
| | | | | ACTGCCTATCTACAAATGAACAACTTGAAAACTGAGGACACTGCCGTGTACTACTGTGTGAGACA |
| | | | | TGGGAACTTCGGTAATAGCTACGTTTCCTGGTGGGCTTACTGGGGCCAAGGGACTCTGGTCACCG |
| | | | | TCTCCTCAGGTGGTGGTGGTTCTGGCGGCGGCGGCTCCGGTGGTGGTGGTTCTCAGACTGTTGTG |
| | | | | ACTCAGGAACCTTCACTCACCGTATCACCTGGTGGAACAGTCACACTCACTTGTGGCTCCTCGAC |
| | | | | TGGGGCTGTTACATCTGGCAACTACCCAAACTGGGTCCAACAAAAACCAGGTCAGGCACCCCGTG |
| | | | | GTCTAATAGGTGGGACTAAGTTCCTCGCCCCCGGTACTCCTGCCAGATTCTCAGGCTCCCTGCTT |
| | | | | GGAGGCAAGGCTGCCCTCACCCTCTCAGGGGTACAGCCAGAGGATGAGGCAGAATATTACTGTGT |
| | | | | TCTATGGTACAGCAACCGCTGGGTGTTCGGTGGAGGAACCAAACTGACTGTCCTA |
| 417 | EGFR VH-VL × | artificial | aa | QVQLKQSGPGLVQPSQSLSITCTVSGFSLTNYGVHWVRQSPGKGLEWLGVIWSGGNTDYNTPFTS |
| | H2C VH VL | | | RLSINKDNSKSQVFFKMNSLQSNDTAIYYCARALTYYDYEFAYWGQGTLVTVSSGGGGSGGGGSG |
| | | | | GGGSDILLTQSPVILSVSPGERVSFSCRASQSIGTNIHWYQQRTNGSPRLLIKYASESISGIPSR |
| | | | | FSGSGSGTDFTLSINSVESEDIADYYCQQNNNWPTTFGAGTKLELKGGGGSEVQLVESGGGLVQP |
| | | | | GGSLKLSCAASCFTFNKYAMNWVRQAPGKGLEWVARIRSKYNNYATYYADSVKDRFTISRDDSKN |
| | | | | TAYLQMNNLKTEDTAVYYCVRHGNFGNSYISYWAYWGQGTLVTVSSGGGGSGGGGSGGGGSQTVV |
| | | | | TQEPSLTVSPGGTVTLTCGSSTGAVTSGYYPNWVQQKPGQAPRGLIGGTKFLAPGTPARFSGSLL |
| | | | | GGKAALTLSGVQPEDEAEYYCALWYSNRWVFGGGTKLTVL |
| 418 | EGFR VH-VL × | artificial | nt | CAGGTGCAGCTGAAGCAGTCAGGACCTGGCCTAGTGCAGCCCTCACAGAGCCTGTCCATCACCTG |
| | H2C VH VL | | | CACAGTCTCTGGTTTCTCATTAACTAACTATGGAGTACACTGGGTTCGCCAGTCTCCAGGAAAGG |
| | | | | GTCTGGAGTGGCTGGGAGTGATATGGAGTGGTGGAAACACAGACTATAATACACCTTTCACATCC |
| | | | | AGACTGAGCATCAACAAGGACAATTCCAAGAGCCAAGTTTTCTTTAAAATGAACAGTCTGCAATC |
| | | | | TAATGACACAGCCATATATTACTGTGCCAGAGCCCTGACCTATTATGACTACGAGTTCGCCTATT |
| | | | | GGGGTCAGGGAACCCTGGTTACCGTGTCTTCCGGTGGTGCTGGTTCTGGCGGCGGCGGCTCCGGT |
| | | | | GGTGGTGGTTCTGACATCTTGCTGACTCAGTCTCCAGTCATCCTGTCTCTGAGTCCAGGAGAAAG |
| | | | | AGTCAGTTTCTCCTGCAGGGCCAGTCAGAGCATTGGCACAAACATACACTGGTATCAGCAAAGAA |
| | | | | CAAATGGTTCTCCAAGGCTTCTCATAAAGTATGCTTCTGAGTCTATCTCTGGGATCCCTTCCAGG |
| | | | | TTTAGTGGCAGTGGATCAGGGACAGATTTTACTCTTAGCATCAACAGTGTGGAGTCTGAAGATAT |
| | | | | TGCAGATTATTACTGTCAACAAAATAATAACTGGCCAACCACATTTGGTGCAGGAACAAAGCTGG |
| | | | | AACTGAAAGGAGGTGGTGGATCCGAGGTGCAGCTGGTCGAGTCTGGAGGAGGATTGGTGCAGCCT |
| | | | | GGAGGGTCATTGAAACTCTCATGTGCAGCCTCTGGATTCACCTTCAATAAGTACGCCATGAACTG |
| | | | | GGTCCGCCAGGCTCCAGGAAAGGGTTTGGAATGGGTTGCTCGCATAAGAAGTAAATATAATAATT |
| | | | | ATGCAACATATTATGCCGATTCAGTGAAAGACAGGTTCACCATCTCCAGAGATGATTCAAAAAAC |
| | | | | ACTGCCTATCTACAAATGAACAACTTGAAAACTGAGGACACTGCCGTGTACTACTGTGTGAGACA |
| | | | | TGGGAACTTCGGTAATAGCTACATATCCTACTGGGCTTACTGGGGCCAAGGGACTCTGGTCACCG |
| | | | | TCTCCTCAGGTGGTGGTGGTTCTGGCGGCGGCGGCTCCGGTGGTGGTGGTTCTCAGACTGTTGTG |
| | | | | ACTCAGGAACCTTCACTCACCGTATCACCTGGTGGAACAGTCACACTCACTTGTGGCTCCTCGAC |
| | | | | TGGGGCTGTTACATGTGGCTACTACCCAAACTGGGTCCAACAAAAACCAGGTCAGGCACCCCGTG |
| | | | | GTCTAATAGGTGGGACTAAGTTCCTCGCCCCCGGTACTCCTGCCAGATTCTCAGGCTCCCTGCTT |
| | | | | GGAGGCAAGGCTGCCCTCACCCTCTCAGGGGTACAGCCAGAGGATGAGGCAGAATATTACTGTGC |
| | | | | TCTATGGTACAGCAACCGCTGGGTGTTCGGTGGAGGAACCAAACTGACTGTCCTA |
| 419 | EGFR VL-VH × | artificial | aa | DILLTQSPVILSVSPGERVSFSCRASQSIGTNIHWYQQRTNGSPRLLIKYASESISGIPSRFSGS |
| | H2C VH VL | | | GSGTDFTLSINSVESEDIADYYCQQNNNWPTTFGAGTKLELKGGGGSGGGGSGGGGSQVQLKQSG |
| | | | | PGLVQPSQSLSITCTVSGFSLTNYGVHWVRQSPGKGLEWLGVIWSGGNTDYNTPFTSRLSINKDN |
| | | | | SKSQVFFKMNSLQSNDTAIYYCARALTYYDYEFAYWGQGTLVTVSSGGGGSEVQLVESGGGLVQP |
| | | | | GGSLKLSCAASGFTFNKYAMNWVRQAPGKGLEWVARIRSKYNNYATYYADSVKDRFTISRDDSKN |
| | | | | TAYLQMNNLKTEDTAVYYCVRHGNFGNSYISYWAYWGQGTLVTVSSGGGGSGGGGSGGGGSQTVV |
| | | | | TQEPSLTVSPGGTVTLTCGSSTGAVTSGYYPNWVQQKPGQAPRGLIGGTKFLAPGTPARFSGSLL |
| | | | | GGKAALTLSGVQPEDEAEYYCALWYSNRWVFGGGTKLTVL |
| 420 | EGFR VL-VH × | artificial | nt | GACATCTTGCTGACTCAGTCTCCAGTCATCCTGTCTGTGAGTCCAGGAGAAAGAGTCAGTTTCTC |
| | H2C VH VL | | | CTGCAGGGCCAGTCAGAGCATTGGCACAAACATACACTGGTATCAGCAAAGAACAAATGGTTCTC |
| | | | | CAAGGCTTCTCATAAAGTATGCTTCTGAGTCTATCTCTGGGATCCCTTCCAGGTTTAGTGGCAGT |
| | | | | GGATCAGGGACAGATTTTACTCTTAGCATCAACAGTGTGGAGTCTGAAGATATTGCAGATTATTA |
| | | | | CTGTCAACAAAATAATAACTGGCCAACCACATTTGGTGCAGGAACAAAGCTGGAACTGAAAGGTG |
| | | | | GTGGTGGTTCTGGCGGCGGCGGCTCCGGTGGTGGTGGTTCTCAGGTGCAGCTGAAGCAGTCAGGA |
| | | | | CCTGGCCTAGTGCAGCCCTCACAGAGCCTGTCCATCACCTGCACAGTCTCTGGTTTCTCATTAAC |
| | | | | TAACTATGGAGTACACTGGGTTCGCCAGTCTCCAGGAAAGGGTCTGGAGTGGCTGGGAGTGATAT |
| | | | | GGAGTGGTGGAAACACAGACTATAATACACCTTTCACATCCAGACTGAGCATCAACAAGGACAAT |
| | | | | TCCAAGAGCCAAGTTTTCTTTAAAATGAACAGTCTGCAATCTAATGACACAGCCATATATTACTG |
| | | | | TGCCAGAGCCCTGACCTATTATGACTACGAGTTCGCCTATTGGGGTCAGGGAACCCTGGTTACCG |
| | | | | TGTCTTCCGGAGGTGGTGGATCCGAGGTGCAGCTGGTCGAGTCTGGAGGAGGATTGGTGCAGCCT |
| | | | | GGAGGGTCATTGAAACTCTCATGTGCAGCCTCTGGATTCACCTTCAATAAGTACGCCATGAACTG |
| | | | | GGTCCGCCAGGCTCCAGGAAAGGGTTTGGAATGGGTTGCTCGCATAAGAAGTAAATATAATAATT |
| | | | | ATGCAACATATTATGCCGATTCAGTGAAAGACAGGTTCACCATCTCCAGAGATGATTCAAAAAAC |
| | | | | ACTGCCTATCTACAAATGAACAACTTGAAAACTGAGGACACTGCCGTGTACTACTGTGTGAGACA |
| | | | | TGGGAACTTCGGTAATAGCTACATATCCTACTGGGCTTACTGGGGCCAAGGGACTCTGGTCACCG |
| | | | | TCTCCTCAGGTGGTGGTGGTTCTGGCGGCGGCGGCTCCGGTGGTGGTGGTTCTCAGACTGTTGTG |
| | | | | ACTCAGGAACCTTCACTCACCGTATCACCTGGTGGAACAGTCACACTCACTTGTGGCTCCTCGAC |
| | | | | TGGGGCTGTTACATCTGGCTACTACCCAAACTGGGTCCAACAAAAACCAGGTCAGGCACCCCGTG |
| | | | | GTCTAATAGGTGGGACTAAGTTCCTCGCCCCCGGTACTCCTGCCAGATTCTCAGGCTCCCTGCTT |
| | | | | GGAGGCAAGGCTGCCCTCACCCTCTCAGGGGTACAGCCAGAGGATGAGGCAGAATATTACTGTGC |
| | | | | TCTATGGTACAGCAACCGCTGGGTGTTCGGTGGAGGAACCAAACTGACTGTCCTA |
| 421 | VH of HER2/neu | artificial | aa | EVQLVESGGGLVQPGGSLRLSCAASGFNIKDTYIHWVRQAPGKGLEWVARIYPTNGYTRYADSVK |
| | | | | GRFTISADTSKNTAYLQMNSLRAEDTAVYYCSRWGGDGFYAMDYWGQGTLVTVSS |
| 422 | VH of Her2/neu | artificial | nt | GAGGTTCAGCTGGTGGAGTCTGGCGGTGGCCTGGTGCAGCCAGGGGGCTCACTCCGTTTGTCCTG |
| | | | | TGCAGCTTCTGGCTTCAACATTAAAGACACCTATATACACTGGGTGCGTCAGGCCCCGGGTAAGG |
| | | | | GCCTGGAATGGGTTGCAAGGATTTATCCTACGAATGGTTATACTAGATATGCCGATAGCGTCAAG |
| | | | | GGCCGTTTCACTATAAGCGCAGACACATCCAAAAACACAGCCTACCTGCAGATGAACAGCCTGCG |
| | | | | TGCTGAGGACACTGCCGTCTATTATTGTTCTAGGTGGGGAGGGGACGGCTTCTATGCTATGGACT |
| | | | | ATTGGGGTCAAGGAACCCTGGTCACTGTCTCCTCC |
| 423 | VL of Her2/neu | artificial | aa | DIQMTQSPSSLSASVGDRVTITCRASQDVNTAVAWYQQKPGKAPKLLIYSASFLYSGVPSRFSGS |
| | | | | RSGTDFTLTISSLQPEDFATYYCQQHYTTPPTFGQGTKVEIK |
| 424 | VL of Her2/neu | artificial | nt | GATATCCAGATGACCCAGTCCCCGAGCTCCCTGTCCGCCTCTGTGGGCGATAGGGTCACCATCAC |
| | | | | CTGCCGTGCCAGTCAGGATGTGAATACTGCTGTAGCCTGGTATCAACAGAAACCAGGAAAAGCTC |
| | | | | CGAAACTACTGATTTACTCGGCATCCTTCCTCTACTCTGGAGTCCCTTCTCGCTTCTCTGGATCC |
| | | | | AGATCTGGGACGGATTTCACTCTGACCATCAGCAGTCTGCAGCCGGAAGACTTCGCAACTTATTA |
| | | | | CTGTCAGCAACATTATACTACTCCTCCCACGTTCGGACAGGGTACCAAGGTGGAGATCAAA |
| 425 | VH-VL of | artificial | aa | EVQLVESGGGLVQPGGSLRLSCAASGFNIKDTYIHWVRQAPGKGLEWVARIYPTNGYTRYADSVK |
| | Her2/neu | | | GRFTISADTSKNTAYLQMNSLRAEDTAVYYCSRWGGDGFYANDYWGQGTLVTVSSGGGGSGGGGS |
| | | | | GGGGSDIQMTQSPSSLSASVGDRVTITCRASQDVNTAVAWYQQKPGKAPKLLIYSASFLYSGVPS |
| | | | | RFSGSRSGTDFTLTISSLQPEDFATYYCQQHYTTPPTFGQGTKVEIK |
| 426 | VH-VL of | artificial | nt | GAGGTTCAGCTGGTGGAGTCTGGCGGTGGCCTGGTGCAGCCAGGGGGCTCACTCCGTTTGTCCTG |
| | Her2/neu | | | TGCAGCTTCTGGCTTCAACATTAAAGACACCTATATACACTGGGTGCGTCAGGCCCCGGGTAAGG |
| | | | | GCCTGGAATGGGTTGCAAGGATTTATCCTACGAATGGTTATACTAGATATGCCGATAGCGTCAAG |
| | | | | GGCCGTTTCACTATAAGCGCAGACACATCCAAAAACACAGCCTACCTGCAGATGAACAGCCTGCG |
| | | | | TGCTGAGGACACTGCCGTCTATTATTGTTCTAGGTGGGGAGGGGACGGCTTCTATGCTATGGACT |
| | | | | ATTGGGGTCAAGGAACCCTGGTCACTGTCTCCTCCGGTGGTGGTGGTTCTGGCGGCGGCGGCTCC |
| | | | | GGTGGTGGTGGTTCTGATATCCAGATGACCCAGTCCCCGAGCTCCCTGTCCGCCTCTGTGGGCGA |
| | | | | TAGGGTCACCATCACCTGCCGTGCCAGTCAGGATGTGAATACTGCTGTAGCCTGGTATCAACAGA |
| | | | | AACCAGGAAAAGCTCCGAAACTACTGATTTACTCGGCATCCTTCCTCTACTCTGGAGTCCCTTCT |
| | | | | CGCTTCTCTGGATCCAGATCTGGGACGGATTTCACTCTGACCATCAGCAGTCTGCAGCCGGAAGA |
| | | | | CTTCGCAACTTATTACTGTCAGCAACATTATACTACTCCTCCCACGTTCGGACAGGGTACCAAGG |
| | | | | TGGAGATCAAA |
| 427 | VL-VH of | artificial | aa | DIQMTQSPSSLSASVGDRVTITCRASQDVNTAVAWYQQKPGKAPKLLIYSASFLYSGVPSRFSGS |
| | Her2/neu | | | RSGTDFTLTISSLQPEDFATYYCQQHYTTPPTFGQGTKVEIKGGGGSGGGGSGGGGSEVQLVESG |
| | | | | GGLVQPGGSLRLSCAASGFNIKDTYIHWVRQAPGKGLEWVARIYPTNGYTRYADSVKGRFTISAD |
| | | | | TSKNTAYLQMNSLRAEDTAVYYCSRWGGDGFYAMDYWGQGTLVTVSS |
| 428 | VL-VH of | artificial | nt | GATATCCAGATGACCCAGTCCCCGAGCTCCCTGTCCGCCTCTGTGGGCGATAGGGTCACCATCAC |
| | Her2/neu | | | CTGCCGTGCCAGTCAGGATGTGAATACTGCTGTAGCCTGGTATCAACAGAAACCAGGAAAAGCTC |
| | | | | CGAAACTACTGATTTACTCGGCATCCTTCCTCTACTCTGGAGTCCCTTCTCGCTTCTCTGGATCC |
| | | | | AGATCTGGGACGGATTTCACTCTGACCATCAGCAGTCTGCAGCCGGAAGACTTCGCAACTTATTA |
| | | | | CTGTCAGCAACATTATACTACTCCTCCCACGTTCGGACAGGGTACCAAGGTGGAGATCAAAGGTG |
| | | | | GTGGTGGTTCTGGCGGCGGCGGCTCCGGTGGTGGTGGTTCTGAGGTTCAGCTGGTGGAGTCTGGC |
| | | | | GGTGGCCTGGTGCAGCCAGGGGGCTCACTCCGTTTGTCCTGTGCAGCTTCTGGCTTCAACATTAA |
| | | | | AGACACCTATATACACTGGGTGCGTCAGGCCCCGGGTAAGGGCCTGGAATGGGTTGCAAGGATTT |
| | | | | ATCCTACGAATGGTTATACTAGATATGCCGATAGCGTCAAGGGCCGTTTCACTATAAGCGCAGAC |
| | | | | ACATCCAAAAACACAGCCTACCTGCAGATGAACAGCCTGCGTGCTGAGGACACTGCCGTCTATTA |
| | | | | TTGTTCTAGGTGGGGAGGGGACGGCTTCTATGCTATGGACTATTGGGGTCAAGGAACCCTGGTCA |
| | | | | CTGTCTCCTCC |
| 429 | Her2/neu VH-VL × | artificial | aa | EVQLVESGGGLVQPGGSLRLSCAASGFNIKDTYIHWVRQAPGKGLEWVARIYPTNGYTRYADSVK |
| | I2C VH VL | | | GRFTISADTSKNTAYLQMNSLRAEDTAVYYCSRWGGDGFYAMDYWGQGTLVTVSSGGGGSGGGGS |
| | | | | GGGGSDIQMTQSPSSLSASVGDRVTITCRASQDVNTAVAWYQQKPGKAPKLLIYSASFLYSGVPS |
| | | | | RFSGSRSGTDFTLTISSLQPEDFATYYCQQHYTTPPTFGQGTKVEIKGGGGSEVQLVESGGGLVQ |
| | | | | PGGSLKLSCAASGFTFNKYAMNWVRQAPGKGLEWVARIRSKYNNYATYYADSVKDRFTISRDDSK |
| | | | | NTAYLQMNNLKTEDTAVYYCVRHGNFGNSYISYWAYWGQGTLVTVSSGGGGSGGGGSGGGGSQTV |
| | | | | VTQEPSLTVSPGGTVTLTCGSSTGAVTSGNYPNWVQQKPGQAPRGLIGGTKFLAPGTPARFSGSL |
| | | | | LGGKAALTLSGVQPEDEAEYYCVLWYSNRWVFGGGTKLTVL |
| 430 | Her2/neu VH-VL × | artificial | nt | GAGGTTCAGCTGGTGGAGTCTGGCGGTGGCCTGGTGCAGCCAGGGGGCTCACTCCGTTTGTCCTG |
| | I2C VH VL | | | TGCAGCTTCTGGCTTCAACATTAAAGACACCTATATACACTGGGTGCGTCAGGCCCCGGGTAAGG |
| | | | | GCCTGGAATGGGTTGCAAGGATTTATCCTACGAATGGTTATACTAGATATGCCGATAGCGTCAAG |
| | | | | GGCCGTTTCACTATAAGCGCAGACACATCCAAAAACACAGCCTACCTGCAGATGAACAGCCTGCG |
| | | | | TGCTGAGGACACTGCCGTCTATTATTGTTCTAGGTGGGGAGGGGACGGCTTCTATGCTATGGACT |
| | | | | ATTGGGGTCAAGGAACCCTGGTCACTGTCTCCTCCGGTGGTGGTGGTTCTGGCGGCGGCGGCTCC |
| | | | | GGTGGTGGTGGTTCTGATATCCAGATGACCCAGTCCCCGAGCTCCCTGTCCGCCTCTGTGGGCGA |
| | | | | TAGGGTCACCATCACCTGCCGTGCCAGTCAGGATGTGAATACTGCTGTAGCCTGGTATCAACAGA |
| | | | | AACCAGGAAAAGCTCCGAAACTACTGATTTACTCGGCATCCTTCCTCTACTCTGGAGTCCCTTCT |
| | | | | CGCTTCTCTGGATCCAGATCTGGGACGGATTTCACTCTGACCATCAGCAGTCTGCAGCCGGAAGA |
| | | | | CTTCGCAACTTATTACTGTCAGCAACATTATACTACTCCTCCCACGTTCGGACAGGGTACCAAGG |
| | | | | TGGAGATCAAAGGAGGTGGTGGATCCGAGGTGCAGCTGGTCGAGTCTGGAGGAGGATTGGTGCAG |
| | | | | CCTGGAGGGTCATTGAAACTCTCATGTGCAGCCTCTGGATTCACCTTCAATAAGTACGCCATGAA |
| | | | | CTGGGTCCGCCAGGCTCCAGGAAAGGGTTTGGAATGGGTTGCTCGCATAAGAAGTAAATATAATA |
| | | | | ATTATGCAACATATTATGCCGATTCAGTGAAAGACAGGTTCACCATCTCCAGAGATGATTCAAAA |
| | | | | AACACTGCCTATCTACAAATGAACAACTTGAAGACTGAGGACACTGCCGTGTACTACTGTGTGAG |
| | | | | ACATGGGAACTTCGGTAATAGCTACATATCCTACTGGGCTTACTGGGGCCAAGGGACTCTGGTCA |
| | | | | CCGTCTCCTCAGGTGGTGGTGGTTCTGGCGGCGGCGGCTCCGGTGGTGGTGGTTCTCAGACTGTT |
| | | | | GTGACTCAGGAACCTTCACTCACCGTATCACCTGGTGGAACAGTCACACTCACTTGTGGCTCCTC |
| | | | | GACTGGGGCTGTTACATCTGGCAACTACCCAAACTGGGTCCAACAAAAACCAGGTCAGGCACCCC |
| | | | | GTGGTCTAATAGGTGGGACTAAGTTCCTCGCCCCCGGTACTCCTGCCAGATTCTCAGGCTCCCTG |
| | | | | CTTGGAGGCAAGGCTGCCCTCACCCTCTCAGGGGTACAGCCAGAGGATGAGGCAGAATATTACTG |
| | | | | TGTTCTATGGTACAGCAACCGCTGGGTGTTCGGTGGAGGAACCAAACTGACTGTCCTA |
| 431 | Her2/neu VL-VH × | artificial | aa | DIQMTQSPSSLSASVGDRVTITCRASQDVNTAVAWYQQKPGKAPKLLIYSASFLYSGVPSRFSGS |
| | I2C VH VL | | | RSGTDFTLTISSLQPEDFATYYCQQHYTTPPTFGQGTKVEIKGGGGSGGGGSGGGGSEVQLVESG |
| | | | | GGLVQPGGSLRLSCAASGFNIKDTYIHWVRQAPGKGLEWVARIYPTNGYTRYADSVKGRFTISAD |
| | | | | TSKNTAYLQMNSLRAEDTAVYYCSRWGGDGFYAMDYWGQGTLVTVSSGGGGSEVQLVESGGGLVQ |
| | | | | PGGSLKLSCAASGFTFNKYAMNWVRQAPGKGLEWVARIRSKYNNYATYYADSVKDRFTISRDDSK |
| | | | | NTAYLQMNNLKTEDTAVYYCVRHGNFGNSYISYWAYWGQGTLVTVSSGGGGSGGGGSGGGGSQTV |
| | | | | VTQEPSLTVSPGGTVTLTCGSSTGAVTSGNYPNWVQQKPGQAPRGLIGGTKFLAPGTPARFSGSL |
| | | | | LGGKAALTLSGVQPEDEAEYYCVLWYSNRWVFGGGTKLTVL |
| 432 | Her2/neu VL-VH × | artificial | nt | GATATCCAGATGACCCAGTCCCCGAGCTCCCTGTCCGCCTCTGTGGGCGATAGGGTCACCATCAC |
| | I2C VH VL | | | CTGCCGTGCCAGTCAGGATGTGAATACTGCTGTAGCCTGGTATCAACAGAAACCAGGAAAAGCTC |
| | | | | CGAAACTACTGATTTACTCGGCATCCTTCCTCTACTCTGGAGTCCCTTCTCGCTTCTCTGGATCC |
| | | | | AGATCTGGGACGGATTTCACTCTGACCATCAGCAGTCTGCAGCCGGAAGACTTCGCAACTTATTA |
| | | | | CTGTCAGCAACATTATACTACTCCTCCCACGTTCGGACAGGGTACCAAGGTGGAGATCAAAGGTG |
| | | | | GTGGTGGTTCTGGCGGCGGCGGCTCCGGTGGTGGTGGTTCTGAGGTTCAGCTGGTGGAGTCTGGC |
| | | | | GGTGGCCTGGTGCAGCCAGGGGGCTCACTCCGTTTGTCCTGTGCAGCTTCTGGCTTCAACATTAA |
| | | | | AGACACCTATATACACTGGGTGCGTCAGGCCCCGGGTAAGGGCCTGGAATGGGTTGCAAGGATTT |
| | | | | ATCCTACGAATGGTTATACTAGATATGCCGATAGCGTCAAGGGCCGTTTCACTATAAGCGCAGAC |
| | | | | ACATCCAAAAACACAGCCTACCTGCAGATGAACAGCCTGCGTGCTGAGGACACTGCCGTCTATTA |
| | | | | TTGTTCTAGGTGGGGAGGGGACGGCTTCTATGCTATGGACTATTGGGGTCAAGGAACCCTGGTCA |
| | | | | CTGTCTCCTCCGGAGGTGGTGGATCCGAGGTGCAGCTGGTCGAGTCTGGAGGAGGATTGGTGCAG |
| | | | | CCTGGAGGGTCATTGAAACTCTCATGTGCAGCCTCTGGATTCACCTTCAATAAGTACGCCATGAA |
| | | | | CTGGGTCCGCCAGGCTCCAGGAAAGGGTTTGGAATGGGTTGCTCGCATAAGAAGTAAATATAATA |
| | | | | ATTATGCAACATATTATGCCGATTCAGTGAAAGACAGGTTCACCATCTCCAGAGATGATTCAAAA |
| | | | | AACACTGCCTATCTACAAATGAACAACTTGAAGACTGAGGACACTGCCGTGTACTACTGTGTGAG |
| | | | | ACATGGGAACTTCGGTAATAGCTACATATCCTACTGGGCTTACTGGGGCCAAGGGACTCTGGTCA |
| | | | | CCGTCTCCTCAGGTGGTGGTGGTTCTGGCGGCGGCGGCTCCGGTGGTGGTGGTTCTCAGACTGTT |
| | | | | GTGACTCAGGAACCTTCACTCACCGTATCACCTGGTGGAACAGTCACACTCACTTGTGGCTCCTC |
| | | | | GACTGGGGCTGTTACATCTGGCAACTACCCAAACTGGGTCCAACAAAAACCAGGTCAGGCACCCC |
| | | | | GTGGTCTAATAGGTGGGACTAAGTTCCTCGCCCCCGGTACTCCTGCCAGATTCTCAGGCTCCCTG |
| | | | | CTTGGAGGCAAGGCTGCCCTCACCCTCTCAGGGGTACAGCCAGAGGATGAGGCAGAATATTACTG |
| | | | | TGTTCTATGGTACAGCAACCGCTGGGTGTTCGGTGGAGGAACCAAACTGACTGTCCTA |
| 433 | Her2/neu VH-VL × | artificial | aa | EVQLVESGGGLVQPGGSLRLSCAASGFNIKDTYIHWVRQAPGKGLEWVARIYPTNGYTRYADSVK |
| | F12Q VH VL | | | GRFTISADTSKNTAYLQMNSLRAEDTAVYYCSRWGGDGFYAMDYWGQGTLVTVSSGGGGSGGGGS |
| | | | | GGGGSDIQMTQSPSSLSASVGDRVTITCRASQDVNTAVAWYQQKPGKAPKLLIYSASFLYSGVPS |
| | | | | RFSGSRSGTDFTLTISSLQPEDFATYYCQQHYTTPPTFGQGTKVEIKGGGGSEVQLVESGGGLVQ |
| | | | | PGGSLKLSCAASGFTFNSYAMNWVRQAPGKGLEWVARIRSKYNNYATYYADSVKGRFTISRDDSK |
| | | | | NTAYLQMNNLKTEDTAVYYCVRHGNFGNSYVSWWAYWGQGTLVTVSSGGGGSGGGGSGGGGSQTV |
| | | | | VTQEPSLTVSPGGTVTLTCGSSTGAVTSGNYPNWVQQKPGQAPRGLIGGTKFLAPGTPARFSGSL |
| | | | | LGGKAALTLSGVQPEDEAEYYCVLWYSNRWVFGGGTKLTVL |
| 434 | Her2/neu VH-VL × | artificial | nt | GAGGTTCAGCTGGTGGAGTCTGGCGGTGGCCTGGTGCAGCCAGGGGGCTCACTCCGTTTGTCCTG |
| | F12Q VH VL | | | TGCAGCTTCTGGCTTCAACATTAAAGACACCTATATACACTGGGTGCGTCAGGCCCCGGGTAAGG |
| | | | | GCCTGGAATGGGTTGCAAGGATTTATCCTACGAATGGTTATACTAGATATGCCGATAGCGTCAAG |
| | | | | GGCCGTTTCACTATAAGCGCAGACACATCCAAAAACACAGCCTACCTGCAGATGAACAGCCTGCG |
| | | | | TGCTGAGGACACTGCCGTCTATTATTGTTCTAGGTGGGGAGGGGACGGCTTCTATGCTATGGACT |
| | | | | ATTGGGGTCAAGGAACCCTGGTCACTGTCTCCTCCGGTGGTGGTGGTTCTGGCGGCGGCGGCTCC |
| | | | | GGTGGTGGTGGTTCTGATATCCAGATGACCCAGTCCCCGAGCTCCCTGTCCGCCTCTGTGGGCGA |
| | | | | TAGGGTCACCATCACCTGCCGTGCCAGTCAGGATGTGAATACTGCTGTAGCCTGGTATCAACAGA |
| | | | | AACCAGGAAAAGCTCCGAAACTACTGATTTACTCGGCATCCTTCCTCTACTCTGGAGTCCCTTCT |
| | | | | CGCTTCTCTGGATCCAGATCTGGGACGGATTTCACTCTGACCATCAGCAGTCTGCAGCCGGAAGA |
| | | | | CTTCGCAACTTATTACTGTCAGCAACATTATACTACTCCTCCCACGTTCGGACAGGGTACCAAGG |
| | | | | TGGAGATCAAAGGAGGTGGTGGATCCGAGGTGCAGCTGGTCGAGTCTGGAGGAGGATTGGTGCAG |
| | | | | CCTGGAGGGTCATTGAAACTCTCATGTGCAGCCTCTGGATTCACCTTCAATAGCTACGCCATGAA |
| | | | | CTGGGTCCGCCAGGCTCCAGGAAAGGGTTTGGAATGGGTTGCTCGCATAAGAAGTAAATATAATA |
| | | | | ATTATGCAACATATTATGCCGATTCAGTGAAAGGCAGGTTCACCATCTCCAGAGATGATTCAAAA |
| | | | | AACACTGCCTATCTACAAATGAACAACTTGAAAACTGAGGACACTGCCGTGTACTACTGTGTGAG |
| | | | | ACATGGGAACTTCGGTAATAGCTACGTTTCCTGGTGGGCTTACTGGGGCCAAGGGACTCTGGTCA |
| | | | | CCGTCTCCTCAGGTGGTGGTGGTTCTGGCGGCGGCGGCTCCGGTGGTGGTGGTTCTCAGACTGTT |
| | | | | GTGACTCAGGAACCTTCACTCACCGTATCACCTGGTGGAACAGTCACACTCACTTGTGGCTCCTC |
| | | | | GACTGGGGCTGTTACATCTGGCAACTACCCAAACTGGGTCCAACAAAAACCAGGTCAGGCACCCC |
| | | | | GTGGTCTAATAGGTGGGACTAAGTTCCTCGCCCCCGGTACTCCTGCCAGATTCTCAGGCTCCCTG |
| | | | | CTTGGAGGCAAGGCTGCCCTCACCCTCTCAGGGGTACAGCCAGAGGATGAGGCAGAATATTACTG |
| | | | | TGTTCTATGGTACAGCAACCGCTGGGTGTTCGGTGGAGGAACCAAACTGACTGTCCTA |
| 435 | Her2/neu VL-VH × | artificial | aa | DIQMTQSPSSLSASVGDRVTITCRASQDVNTAVAWYQQKPGKAPKLLIYSASFLYSGVPSRFSGS |
| | F12Q VH VL | | | RSGTDFTLTISSLQPEDFATYYCQQHYTTPPTFGQGTKVEIKGGGGSGGGGSGGGGSEVQLVESG |
| | | | | GGLVQPGGSLRLSCAASGFNIKDTYIHWVRQAPGKGLEWVARIYPTNGYTRYADSVKGRFTISAD |
| | | | | TSKNTAYLQMNSLRAEDTAVYYCSRWGGDGFYAMDYWGQGTLVTVSSGGGGSEVQLVESGGGLVQ |
| | | | | PGGSLKLSCAASGFTFNSYAMNWVRQAPGKGLEWVARIRSKYNNYATYYADSVKGRFTISRDDSK |
| | | | | NTAYLQMNNLKTEDTAVYYCVRHGNFGNSYVSWWAYWGQGTLVTVSSGGGGSGGGGSGGGGSQTV |
| | | | | VTQEPSLTVSPGGTVTLTCGSSTGAVTSGNYPNWVQQKPGQAPRGLIGGTKFLAPGTPARFSGSL |
| | | | | LGGKAALTLSGVQPEDEAEYYCVLWYSNRWVFGGGTKLTVL |
| 436 | Her2/neu VL-VH × | artificial | nt | GATATCCAGATGACCCAGTCCCCGAGCTCCCTGTCCGCCTCTGTGGGCGATAGGGTCACCATCAC |
| | F12Q VH VL | | | CTGCCGTGCCAGTCAGGATGTGAATACTGCTGTAGCCTGGTATCAACAGAAACCAGGAAAAGCTC |
| | | | | CGAAACTACTGATTTACTCGGCATCCTTCCTCTACTCTGGAGTCCCTTCTCGCTTCTCTGGATCC |
| | | | | AGATCTGGGACGGATTTCACTCTGACCATCAGCAGTCTGCAGCCGGAAGACTTCGCAACTTATTA |
| | | | | CTGTCAGCAACATTATACTACTCCTCCCACGTTCGGACAGGGTACCAAGGTGGAGATCAAAGGTG |
| | | | | GTGGTGGTTCTGGCGGCGGCGGCTCCGGTGGTGGTGGTTCTGAGGTTCAGCTGGTGGAGTCTGGC |
| | | | | GGTGGCCTGGTGCAGCCAGGGGGCTCACTCCGTTTGTCCTGTGCAGCTTCTGGCTTCAACATTAA |
| | | | | AGACACCTATATACACTGGGTGCGTCAGGCCCCGGGTAAGGGCCTGGAATGGGTTGCAAGGATTT |
| | | | | ATCCTACGAATGGTTATACTAGATATGCCGATAGCGTCAAGGGCCGTTTCACTATAAGCGCAGAC |
| | | | | ACATCCAAAAACACAGCCTACCTGCAGATGAACAGCCTGCGTGCTGAGGACACTGCCGTCTATTA |
| | | | | TTGTTCTAGGTGGGGAGGGGACGGCTTCTATGCTATGGACTATTGGGGTCAAGGAACCCTGGTCA |
| | | | | CTGTCTCCTCCGGAGGTGGTGGATCCGAGGTGCAGCTGGTCGAGTCTGGAGGAGGATTGGTGCAG |
| | | | | CCTGGAGGGTCATTGAAACTCTCATGTGCAGCCTCTGGATTCACCTTCAATAGCTACGCCATGAA |
| | | | | CTGGGTCCGCCAGGCTCCAGGAAAGGGTTTGGAATGGGTTGCTCGCATAAGAAGTAAATATAATA |
| | | | | ATTATGCAACATATTATGCCGATTCAGTGAAAGGCAGGTTCACCATCTCCAGAGATGATTCAAAA |
| | | | | AACACTGCCTATCTACAAATGAACAACTTGAAAACTGAGGACACTGCCGTGTACTACTGTGTGAG |
| | | | | ACATGGGAACTTCGGTAATAGCTACGTTTCCTGGTGGGCTTACTGGGGCCAAGGGACTCTGGTCA |
| | | | | CCGTCTCCTCAGGTGGTGGTGGTTCTGGCGGCGGCGGCTCCGGTGGTGGTGGTTCTCAGACTGTT |
| | | | | GTGACTCAGGAACCTTCACTCACCGTATCACCTGGTGGAACAGTCACACTCACTTGTGGCTCCTC |
| | | | | GACTGGGGCTGTTACATCTGGCAACTACCCAAACTGGGTCCAACAAAAACCAGGTCAGGCACCCC |
| | | | | GTGGTCTAATAGGTGGGACTAAGTTCCTCGCCCCCGGTACTCCTGCCAGATTCTCAGGCTCCCTG |
| | | | | CTTGGAGGCAAGGCTGCCCTCACCCTCTCAGGGGTACAGCCAGAGGATGAGGCAGAATATTACTG |
| | | | | TGTTCTATGGTACAGCAACCGCTGGGTGTTCGGTGGAGGAACCAAACTGACTGTCCTA |
| 437 | Her2/neu VH-VL × | artificial | aa | EVQLVESGGGLVQPGGSLRLSCAASGFNIKDTYIHWVRQAPGKGLEWVARIYPTNGYTRYADSVK |
| | H2C VH VL | | | GRFTISADTSKNTAYLQMNSLRAEDTAVYYCSRWGGDGFYAMDYWGQGTLVTVSSGGGGSGGGGS |
| | | | | GGGGSDIQMTQSPSSLSASVGDRVTITCRASQDVNTAVAWYQQKPGKAPKLLIYSASFLYSGVPS |
| | | | | RFSGSRSGTDFTLTISSLQPEDFATYYCQQHYTTPPTFGQGTKVEIKGGGGSEVQLVESGGGLVQ |
| | | | | PGGSLKLSCAASGFTFNKYAMNWVRQAPGKGLEWVARIRSKYNNYATYYADSVKDRFTISRDDSK |
| | | | | NTAYLQMNNLKTEDTAVYYCVRHGNFGNSYISYWAYWGQGTLVTVSSGGGGSGGGGSGGGGSQTV |
| | | | | VTQEPSLTVSPGGTVTLTCGSSTGAVTSGYYPNWVQQKPGQAPRGLIGGTKFLAPGTPARFSGSL |
| | | | | LGGKAALTLSGVQPEDEAEYYCALWYSNRWVFGGGTKLTVL |
| 438 | Her2/neu VH-VL × | artificial | nt | GAGGTTCAGCTGGTGGAGTCTGGCGGTGGCCTGGTGCAGCCAGGGGGCTCACTCCGTTTGTCCTG |
| | H2C VH VL | | | TGCAGCTTCTGGCTTCAACATTAAAGACACCTATATACACTGGGTGCGTCAGGCCCCGGGTAAGG |
| | | | | GCCTGGAATGGGTTGCAAGGATTTATCCTACGAATGGTTATACTAGATATGCCGATAGCGTCAAG |
| | | | | GGCCGTTTCACTATAAGCGCAGACACATCCAAAAACACAGCCTACCTGCAGATGAACAGCCTGCG |
| | | | | TGCTGAGGACACTGCCGTCTATTATTGTTCTAGGTGGGGAGGGGACGGCTTCTATGCTATGGACT |
| | | | | ATTGGGGTCAAGGAACCCTGGTCACTGTCTCCTCCGGTGGTGGTGGTTCTGGCGGCGGCGGCTCC |
| | | | | GGTGGTGGTGGTTCTGATATCCAGATGACCCAGTCCCCGAGCTCCCTGTCCGCCTCTGTGGGCGA |
| | | | | TAGGGTCACCATCACCTGCCGTGCCAGTCAGGATGTGAATACTGCTGTAGCCTGGTATCAACAGA |
| | | | | AACCAGGAAAAGCTCCGAAACTACTGATTTACTCGGCATCCTTCCTCTACTCTGGAGTCCCTTCT |
| | | | | CGCTTCTCTGGATCCAGATCTGGGACGGATTTCACTCTGACCATCAGCAGTCTGCAGCCGGAAGA |
| | | | | CTTCGCAACTTATTACTGTCAGCAACATTATACTACTCCTCCCACGTTCGGACAGGGTACCAAGG |
| | | | | TGGAGATCAAAGGAGGTGGTGGATCCGAGGTGCAGCTGGTCGAGTCTGGAGGAGGATTGGTGCAG |
| | | | | CCTGGAGGGTCATTGAAACTCTCATGTGCAGCCTCTGGATTCACCTTCAATAAGTACGCCATGAA |
| | | | | CTGGGTCCGCCAGGCTCCAGGAAAGGGTTTGGAATGGGTTGCTCGCATAAGAAGTAAATATAATA |
| | | | | ATTATGCAACATATTATGCCGATTCAGTGAAAGACAGGTTCACCATCTCCAGAGATGATTCAAAA |
| | | | | AACACTGCCTATCTACAAATGAACAACTTGAAAACTGAGGACACTGCCGTGTACTACTGTGTGAG |
| | | | | ACATGGGAACTTCGGTAATAGCTACATATCCTACTGGGCTTACTGGGGCCAAGGGACTCTGGTCA |
| | | | | CCGTCTCCTCAGGTGGTGGTGGTTCTGGCGGCGGCGGCTCCGGTGGTGGTGGTTCTCAGACTGTT |
| | | | | GTGACTCAGGAACCTTCACTCACCGTATCACCTGGTGGAACAGTCACACTCACTTGTGGCTCCTC |
| | | | | GACTGGGGCTGTTACATCTGGCTACTACCCAAACTGGGTCCAACAAAAACCAGGTCAGGCACCCC |
| | | | | GTGGTCTAATAGGTGGGACTAAGTTCCTCGCCCCCGGTACTCCTGCCAGATTCTCAGGCTCCCTG |
| | | | | CTTGGAGGCAAGGCTGCCCTCACCCTCTCAGGGGTACAGCCAGAGGATGAGGCAGAATATTACTG |
| | | | | TGCTCTATGGTACAGCAACCGCTGGGTGTTCGGTGGAGGAACCAAACTGACTGTCCTA |
| 439 | Her2/neu VL-VH × | artificial | aa | DIQMTQSPSSLSASVGDRVTITCRASQDVNTAVAWYQQKPGKAPKLLIYSASFLYSGVPSRFSGS |
| | H2C VH VL | | | RSGTDFTLTISSLQPEDFATYYCQQHYTTPPTFGQGTKVEIKGGGGSGGGGSGGGGSEVQLVESG |
| | | | | GGLVQPGGSLRLSCAASGFNIKDTYIHWVRQAPGKGLEWVARIYPTNGYTRYADSVKGRFTISAD |
| | | | | TSKNTAYLQMNSLRAEDTAVYYCSRWGGDGFYAMDYWGQGTLVTVSSGGGGSEVQLVESGGGLVQ |
| | | | | PGGSLKLSCAASGFTFNKYAMNWVRQAPGKGLEWVARIRSKYNNYATYYADSVKDRFTISRDDSK |
| | | | | NTAYLQMNNLKTEDTAVYYCVRHGNFGNSYISYWAYWGQGTLVTVSSGGGGSGGGGSGGGGSQTV |
| | | | | VTQEPSLTVSPGGTVTLTCGSSTGAVTSGYYPNWVQQKPGQAPRGLIGGTKFLAPGTPARFSGSL |
| | | | | LGGKAALTLSGVQPEDEAEYYCALWYSNRWVFGGGTKLTVL |
| 440 | Her2/neu VL-VH × | artificial | nt | GATATCCAGATGACCCAGTCCCCGAGCTCCCTGTCCGCCTCTGTGGGCGATAGGGTCACCATCAC |
| | H2C VH VL | | | CTGCCGTGCCAGTCAGGATGTGAATACTGCTGTAGCCTGGTATCAACAGAAACCAGGAAAAGCTC |
| | | | | CGAAACTACTGATTTACTCGGCATCCTTCCTCTACTCTGGAGTCCCTTCTCGCTTCTCTGGATCC |
| | | | | AGATCTGGGACGGATTTCACTCTGACCATCAGCAGTCTGCAGCCGGAAGACTTCGCAACTTATTA |
| | | | | CTGTCAGCAACATTATACTACTCCTCCCACGTTCGGACAGGGTACCAAGGTGGAGATCAAAGGTG |
| | | | | GTGGTGGTTCTGGCGGCGGCGGCTCCGGTGGTGGTGGTTCTGAGGTTCAGCTGGTGGAGTCTGGC |
| | | | | GGTGGCCTGGTGCAGCCAGGGGGCTCACTCCGTTTGTCCTGTGCAGCTTCTGGCTTCAACATTAA |
| | | | | AGACACCTATATACACTGGGTGCGTCAGGCCCCGGGTAAGGGCCTGGAATGGGTTGCAAGGATTT |
| | | | | ATCCTACGAATGGTTATACTAGATATGCCGATAGCGTCAAGGGCCGTTTCACTATAAGCGCAGAC |
| | | | | ACATCCAAAAACACAGCCTACCTGCAGATGAACAGCCTGCGTGCTGAGGACACTGCCGTCTATTA |
| | | | | TTGTTCTAGGTGGGGAGGGGACGGCTTCTATGCTATGGACTATTGGGGTCAAGGAACCCTGGTCA |
| | | | | CTGTCTCCTCCGGAGGTGGTGGATCCGAGGTGCAGCTGGTCGAGTCTGGAGGAGGATTGGTGCAG |
| | | | | CCTGGAGGGTCATTGAAACTCTCATGTGCAGCCTCTGGATTCACCTTCAATAAGTACGCCATGAA |
| | | | | CTGGGTCCGCCAGGCTCCAGGAAAGGGTTTGGAATGGGTTGCTCGCATAAGAAGTAAATATAATA |
| | | | | ATTATGCAACATATTATGCCGATTCAGTGAAAGACAGGTTCACCATCTCCAGAGATGATTCAAAA |
| | | | | AACACTGCCTATCTACAAATGAACAACTTGAAAACTGAGGACACTGCCGTGTACTACTGTGTGAG |
| | | | | ACATGGGAACTTCGGTAATAGCTACATATCCTACTGGGCTTACTGGGGCCAAGGGACTCTGGTCA |
| | | | | CCGTCTCCTCAGGTGGTGGTGGTTCTGGCGGCGGCGGCTCCGGTGGTGGTGGTTCTCAGACTGTT |
| | | | | GTGACTCAGGAACCTTCACTCACCGTATCACCTGGTGGAACAGTCACACTCACTTGTGGCTCCTC |
| | | | | GACTGGGGCTGTTACATCTGGCTACTACCCAAACTGGGTCCAACAAAAACCAGGTCAGGCACCCC |
| | | | | GTGGTCTAATAGGTGGGACTAAGTTCCTCGCCCCCGGTACTCCTGCCAGATTCTCAGGCTCCCTG |
| | | | | CTTGGAGGCAAGGCTGCCCTCACCCTCTCAGGGGTACAGCCAGAGGATGAGGCAGAATATTACTG |
| | | | | TGCTCTATGGTACAGCAACCGCTGGGTGTTCGGTGGAGGAACCAAACTGACTGTCCTA |
| 441 | HCDR1 of EGFR | artificial | aa | SGDYYWT |
| 442 | HCDR2 of EGFR | artificial | aa | HIYYSGNTNYNPSLKS |
| 443 | HCDR3 of EGFR | artificial | aa | DRVTGAFDI |
| 444 | LCDR1 of EGFR | artificial | aa | QASQDISNYLN |
| 445 | LCDR2 of EGFR | artificial | aa | DASNLET |
| 446 | LCDR3 of EGFR | artificial | aa | QHFDHLPLA |
| 447 | EGFR HL × H2C | artificial | aa | QVQLQESGPGLVKPSETLSLTCTVSGGSVSSGDYYWTWIRQSPGKGLEWIGHIYYSGNTNYNPSL |
| | HL | | | KSRLTISIDTSKTQFSLKLSSVTAADTAIYYCVRDRVTGAFDIWGQGTMVTVSSGGGGSGGGGSG |
| | | | | GGGSDIQMTQSPSSLSASVGDRVTITCQASQDISNYLNWYQQKPGKAPKLLIYDASNLETGVPSR |
| | | | | FSGSGSGTDFTFTISSLQPEDIATYFCQHFDHLPLAFGGGTKVEIKSGGGGSEVQLVESGGGLVQ |
| | | | | PGGSLKLSCAASGFTFNKYAMNWVRQAPGKGLEWVARIRSKYNNYATYYADSVKDRFTISRDDSK |
| | | | | NTAYLQMNNLKTEDTAVYYCVRHGNFGNSYISYWAYWGQGTLVTVSSGGGGSGGGGSGGGGSQTV |
| | | | | VTQEPSLTVSPGGTVTLTCGSSTGAVTSGYYPNWVQQKPGQAPRGLIGGTKFLAPGTPARFSGSL |
| | | | | LGGKAALTLSGVQPEDEAEYYCALWYSNRWVFGGGTKLTVL |
| 448 | EGFR HL × H2C | artificial | nt | CAGGTGCAGCTGCAGGAGTCGGGCCCAGGACTGGTGAAGCCTTCGGAGACCCTGTCCCTCACCTG |
| | HL | | | CACTGTCTCTGGTGGCTCCGTCAGCAGTGGTGATTACTACTGGACCTGGATCCGGCAGTCCCCAG |
| | | | | GGAAGGGACTGGAGTGGATTGGACACATCTATTACAGTGGGAACACCAATTATAACCCCTCCCTC |
| | | | | AAGAGCCGACTCACCATATCAATTGACACGTCCAAGACTCAGTTCTCCCTGAAGCTGAGTTCTGT |
| | | | | GACCGCTGCGGACACGGCCATTTATTACTGTGTGCGAGATCGAGTGACTGGTGCTTTTGATATCT |
| | | | | GGGGCCAAGGGACAATGGTCACCGTCTCTTCCGGTGGTGGTGGTTCTGGCGGCGGCGGCTCCGGT |
| | | | | GGTGGTGGTTCTGACATCCAGATGACCCAGTCTCCATCCTCCCTGTCTGCATCTGTCGGAGACAG |
| | | | | AGTCACCATCACTTGCCAGGCGAGTCAGGACATCAGCAACTATTTAAATTGGTATCAGCAGAAAC |
| | | | | CAGGGAAAGCCCCTAAACTCCTGATCTACGATGCATCCAATTTGGAAACAGGGGTCCCATCAAGG |
| | | | | TTCAGTGGAAGTGGATCTGGGACAGATTTTACTTTCACCATCAGCAGCCTGCAGCCTGAAGATAT |
| | | | | TGCAACATATTTCTGTCAACACTTTGATCATCTCCCGCTCGCTTTCGGCGGAGGGACCAAGGTGG |
| | | | | AGATCAAATCCGGAGGTGGTGGATCCGAGGTGCAGCTGGTCGAGTCTGGAGGAGGATTGGTGCAG |
| | | | | CCTGGAGGGTCATTGAAACTCTCATGTGCAGCCTCTGGATTCACCTTCAATAAGTACGCCATGAA |
| | | | | CTGGGTCCGCCAGGCTCCAGGAAAGGGTTTGGAATGGGTTGCTCGCATAAGAAGTAAATATAATA |
| | | | | ATTATGCAACATATTATGCCGATTCAGTGAAAGACAGGTTCACCATCTCCAGAGATGATTCAAAA |
| | | | | AACACTGCCTATCTACAAATGAACAACTTGAAAACTGAGGACACTGCCGTGTACTACTGTGTGAG |
| | | | | ACATGGGAACTTCGGTAATAGCTACATATCCTACTGGGCTTACTGGGGCCAAGGGACTCTGGTCA |
| | | | | CCGTCTCCTCAGGTGGTGGTGGTTCTGGCGGCGGCGGCTCCGGTGGTGGTGGTTCTCAGACTGTT |
| | | | | GTGACTCAGGAACCTTCACTCACCGTATCACCTGGTGGAACAGTCACACTCACTTGTGGCTCCTC |
| | | | | GACTGGGGCTGTTACATCTGGCTACTACCCAAACTGGGTCCAACAAAAACCAGGTCAGGCACCCC |
| | | | | GTGGTCTAATAGGTGGGACTAAGTTCCTCGCCCCCGGTACTCCTGCCAGATTCTCAGGCTCCCTG |
| | | | | CTTGGAGGCAAGGCTGCCCTCACCCTCTCAGGGGTACAGCCAGAGGATGAGGCAGAATATTACTG |
| | | | | TGCTCTATGGTACAGCAACCGCTGGGTGTTCGGTGGAGGAACCAAACTGACTGTCCTA |
| 449 | EGFR HL × F12Q | artificial | aa | QVQLQESGPGLVKPSETLSLTCTVSGGSVSSGDYYWTWIRQSPGKGLEWIGHIYYSGNTNYNPSL |
| | LH | | | KSRLTISIDTSKTQFSLKLSSVTAADTAIYYCVRDRVTGAFDIWGQGTMVTVSSggggsggggs |
| | | | | ggggsDIQMTQSPSSLSASVGDRVTITCQASQDISNYLNWYQQKPGKAPKLLIYDASNLETGVP |
| | | | | SRFSGSGSGTDFTFTISSLQPEDIATYFCQHFDHLPLAFGGGTKVEIKSGGGGSEVQLVESGGGL |
| | | | | VQPGGSLKLSCAASGFTFNSYAMNWVRQAPGKGLEWVARIRSKYNNYATYYADSVKGRFTISRDD |
| | | | | SKNTAYLQMNNLKTEDTAVYYCVRHGNFGNSYVSWWAYWGQGTLVTVSSGGGGSGGGGSGGGGSQ |
| | | | | TVVTQEPSLTVSPGGTVTLTCGSSTGAVTSGNYPNWVQQKPGQAPRGLIGGTKFLAPGTPARFSG |
| | | | | SLLGGKAALTLSGVQPEDEAEYYCVLWYSNRWVFGGGTKLTVL |
| 450 | EGFR HL × F12Q | artificial | nt | CAGGTGCAGCTGCAGGAGTCGGGCCCAGGACTGGTGAAGCCTTCGGAGACCCTGTCCCTCACCTG |
| | LH | | | CACTGTCTCTGGTGGCTCCGTCAGCAGTGGTGATTACTACTGGACCTGGATCCGGCAGTCCCCAG |
| | | | | GGAAGGGACTGGAGTGGATTGGACACATCTATTACAGTGGGAACACCAATTATAACCCCTCCCTC |
| | | | | AAGAGCCGACTCACCATATCAATTGACACGTCCAAGACTCAGTTCTCCCTGAAGCTGAGTTCTGT |
| | | | | GACCGCTGCGGACACGGCCATTTATTACTGTGTGCGAGATCGAGTGACTGGTGCTTTTGATATCT |
| | | | | GGGGCCAAGGGACAATGGTCACCGTCTCTTCCGGTGGTGGTGGTTCTGGCGGCGGCGGCTCCGGT |
| | | | | GGTGGTGGTTCTGACATCCAGATGACCCAGTCTCCATCCTCCCTGTCTGCATCTGTCGGAGACAG |
| | | | | AGTCACCATCACTTGCCAGGCGAGTCAGGACATCAGCAACTATTTAAATTGGTATCAGCAGAAAC |
| | | | | CAGGGAAAGCCCCTAAACTCCTGATCTACGATGCATCCAATTTGGAAACAGGGGTCCCATCAAGG |
| | | | | TTCAGTGGAAGTGGATCTGGGACAGATTTTACTTTCACCATCAGCAGCCTGCAGCCTGAAGATAT |
| | | | | TGCAACATATTTCTGTCAACACTTTGATCATCTCCCGCTCGCTTTCGGCGGAGGGACCAAGGTGG |
| | | | | AGATCAAATCCGGAGGTGGTGGATCCGAGGTGCAGCTGGTCGAGTCTGGAGGAGGATTGGTGCAG |
| | | | | CCTGGAGGGTCATTGAAACTCTCATGTGCAGCCTCTGGATTCACCTTCAATAGCTACGCCATGAA |
| | | | | CTGGGTCCGCCAGGCTCCAGGAAAGGGTTTGGAATGGGTTGCTCGCATAAGAAGTAAATATAATA |
| | | | | ATTATGCAACATATTATGCCGATTCAGTGAAAGGCAGGTTCACCATCTCCAGAGATGATTCAAAA |
| | | | | AACACTGCCTATCTACAAATGAACAACTTGAAAACTGAGGACACTGCCGTGTACTACTGTGTGAG |
| | | | | ACATGGGAACTTCGGTAATAGCTACGTTTCCTGGTGGGCTTACTGGGGCCAAGGGACTCTGGTCA |
| | | | | CCGTCTCCTCAGGTGGTGGTGGTTCTGGCGGCGGCGGCTCCGGTGGTGGTGGTTCTCAGACTGTT |
| | | | | GTGACTCAGGAACCTTCACTCACCGTATCACCTGGTGGAACAGTCACACTCACTTGTGGCTCCTC |
| | | | | GACTGGGGCTGTTACATCTGGCAACTACCCAAACTGGGTCCAACAAAAACCAGGTCAGGCACCCC |
| | | | | GTGGTCTAATAGGTGGGACTAAGTTCCTCGCCCCCGGTACTCCTGCCAGATTCTCAGGCTCCCTG |
| | | | | CTTGGAGGCAAGGCTGCCCTCACCCTCTCAGGGGTACAGCCAGAGGATGAGGCAGAATATTACTG |
| | | | | TGTTCTATGGTACAGCAACCGCTGGGTGTTCGGTGGAGGAACCAAACTGACTGTCCTA |
| 451 | EGFR HL × I2C | artificial | aa | QVQLQESGPGLVKPSETLSLTCTVSGGSVSSGDYYWTWIRQSPGKGLEWIGHIYYSGNTNYNPSL |
| | HL | | | KSRLTISIDTSKTQFSLKLSSVTAADTAIYYCVRDRVTGAFDIWGQGTMVTVSSggggsggggs |
| | | | | ggggsDIQMTQSPSSLSASVGDRVTITCQASQDISNYLNWYQQKPGKAPKLLIYDASNLETGVP |
| | | | | SRFSGSGSGTDFTFTISSLQPEDIATYFCQHFDHLPLAFGGGTKVEIKSGGGGSEVQLVESGGGL |
| | | | | VQPGGSLKLSCAASGFTFNKYAMNWVRQAPGKGLEWVARIRSKYNNYATYYADSVKDRFTISRDD |
| | | | | SKNTAYLQMNNLKTEDTAVYYCVRHGNFGNSYISYWAYWGQGTLVTVSSGGGGSGGGGSGGGGSQ |
| | | | | TVVTQEPSLTVSPGGTVTLTCGSSTGAVTSGNYPNWVQQKPGQAPRGLIGGTKFLAPGTPARFSG |
| | | | | SLLGGKAALTLSGVQPEDEAEYYCVLWYSNRWVFGGGTKLTVL |
| 452 | EGFR HL × I2C | artificial | nt | CAGGTGCAGCTGCAGGAGTCGGGCCCAGGACTGGTGAAGCCTTCGGAGACCCTGTCCCTCACCTG |
| | HL | | | CACTGTCTCTGGTGGCTCCGTCAGCAGTGGTGATTACTACTGGACCTGGATCCGGCAGTCCCCAG |
| | | | | GGAAGGGACTGGAGTGGATTGGACACATCTATTACAGTGGGAACACCAATTATAACCCCTCCCTC |
| | | | | AAGAGCCGACTCACCATATCAATTGACACGTCCAAGACTCAGTTCTCCCTGAAGCTGAGTTCTGT |
| | | | | GACCGCTGCGGACACGGCCATTTATTACTGTGTGCGAGATCGAGTGACTGGTGCTTTTGATATCT |
| | | | | GGGGCCAAGGGACAATGGTCACCGTCTCTTCCGGTGGTGGTGGTTCTGGCGGCGGCGGCTCCGGT |
| | | | | GGTGGTGGTTCTGACATCCAGATGACCCAGTCTCCATCCTCCCTGTCTGCATCTGTCGGAGACAG |
| | | | | AGTCACCATCACTTGCCAGGCGAGTCAGGACATCAGCAACTATTTAAATTGGTATCAGCAGAAAC |
| | | | | CAGGGAAAGCCCCTAAACTCCTGATCTACGATGCATCCAATTTGGAAACAGGGGTCCCATCAAGG |
| | | | | TTCAGTGGAAGTGGATCTGGGACAGATTTTACTTTCACCATCAGCAGCCTGCAGCCTGAAGATAT |
| | | | | TGCAACATATTTCTGTCAACACTTTGATCATCTCCCGCTCGCTTTCGGCGGAGGGACCAAGGTGG |
| | | | | AGATCAAATCCGGAGGTGGTGGATCCGAGGTGCAGCTGGTCGAGTCTGGAGGAGGATTGGTGCAG |
| | | | | CCTGGAGGGTCATTGAAACTCTCATGTGCAGCCTCTGGATTCACCTTCAATAAGTACGCCATGAA |
| | | | | CTGGGTCCGCCAGGCTCCAGGAAAGGGTTTGGAATGGGTTGCTCGCATAAGAAGTAAATATAATA |
| | | | | ATTATGCAACATATTATGCCGATTCAGTGAAAGACAGGTTCACCATCTCCAGAGATGATTCAAAA |
| | | | | AACACTGCCTATCTACAAATGAACAACTTGAAAACTGAGGACACTGCCGTGTACTACTGTGTGAG |
| | | | | ACATGGGAACTTCGGTAATAGCTACATATCCTACTGGGCTTACTGGGGCCAAGGGACTCTGGTCA |
| | | | | CCGTCTCCTCAGGTGGTGGTGGTTCTGGCGGCGGCGGCTCCGGTGGTGGTGGTTCTCAGACTGTT |
| | | | | GTGACTCAGGAACCTTCACTCACCGTATCACCTGGTGGAACAGTCACACTCACTTGTGGCTCCTC |
| | | | | GACTGGGGCTGTTACATCTGGCAACTACCCAAACTGGGTCCAACAAAAACCAGGTCAGGCACCCC |
| | | | | GTGGTCTAATAGGTGGGACTAAGTTCCTCGCCCCCGGTACTCCTGCCAGATTCTCAGGCTCCCTG |
| | | | | CTTGGAGGCAAGGCTGCCCTCACCCTCTCAGGGGTACAGCCAGAGGATGAGGCAGAATATTACTG |
| | | | | TGTTCTATGGTACAGCAACCGCTGGGTGTTCGGTGGAGGAACCAAACTGACTGTCCTA |
| 453 | HCDR1 of EGFR | artificial | aa | NYGVH |
| 454 | HCDR2 of EGFR | artificial | aa | VIWSGGNTDYNTPFTS |
| 455 | HCDR3 of EGFR | artificial | aa | ALTYYDYEFAY |
| 456 | LCDR1 of EGFR | artificial | aa | RASQSIGTNIH |
| 457 | LCDR2 of EGFR | artificial | aa | YASESIS |
| 458 | LCDR3 of EGFR | artificial | aa | QQNNNWPTT |
| 459 | human HER2 | human | nt | ATGGAGCTGGCGGCCTTGTGCCGCTGGGGGCTCCTCCTCGCCCTCTTGCCCCCCGGAGCCGCGAG |
| | protein | | | CACCCAAGTGTGCACCGGCACAGACATGAAGCTGCGGCTCCCTGCCAGTCCCGAGACCCACCTGG |
| | | | | ACATGCTCCGCCACCTCTACCAGGGCTGCCAGGTGGTGCAGGGAAACCTGGAACTCACCTACCTG |
| | | | | CCCACCAATGCCAGCCTGTCCTTCCTGCAGGATATCCAGGAGGTGCAGGGCTACGTGCTCATCGC |
| | | | | TCACAACCAAGTGAGGCAGGTCCCACTGCAGAGGCTGCGGATTGTGCGAGGCACCCAGCTCTTTG |
| | | | | AGGACAACTATGCCCTGGCCGTGCTAGACAATGGAGACCCGCTGAACAATACCACCCCTGTCACA |
| | | | | GGGGCCTCCCCAGGAGGCCTGCGGGAGCTGCAGCTTCGAAGCCTCACAGAGATCTTGAAAGGAGG |
| | | | | GGTCTTGATCCAGCGGAACCCCCAGCTCTGCTACCAGGACACGATTTTGTGGAAGGACATCTTCC |
| | | | | ACAAGAACAACCAGCTGGCTCTCACACTGATAGACACCAACCGCTCTCGGGCCTGCCACCCCTGT |
| | | | | TCTCCGATGTGTAAGGGCTCCCGCTGCTGGGGAGAGAGTTCTGAGGATTGTCAGAGCCTGACGCG |
| | | | | CACTGTCTGTGCCGGTGGCTGTGCCCGCTGCAAGGGGCCACTGCCCACTGACTGCTGCCATGAGC |
| | | | | AGTGTGCTGCCGGCTGCACGGGCCCCAAGCACTCTGACTGCCTGGCCTGCCTCCACTTCAACCAC |
| | | | | AGTGGCATCTGTGAGCTGCACTGCCCAGCCCTGGTCACCTACAACACAGACACGTTTGAGTCCAT |
| | | | | GCCCAATCCCGAGGGCCGGTATACATTCGGCGCCAGCTGTGTGACTGCCTGTCCCTACAACTACC |
| | | | | TTTCTACGGACGTGGGATCCTGCACCCTCGTCTGCCCCCTGCACAACCAAGAGGTGACAGCAGAG |
| | | | | GATGGAACACAGCGGTGTGAGAAGTGCAGCAAGCCCTGTGCCCGAGTGTGCTATGGTCTGGGCAT |
| | | | | GGAGCACTTGCGAGAGGTGAGGGCAGTTACCAGTGCCAATATCCAGGAGTTTGCTGGCTGCAAGA |
| | | | | AGATCTTTGGGAGCCTGGCATTTCTGCCGGAAAGCTTTGATGGGGACCCAGCCTCCAACACTGCC |
| | | | | CCGCTCCAGCCAGAGCAGCTCCAAGTGTTTGAGACTCTGGAAGAGATCACAGGTTACCTATACAT |
| | | | | CTCAGCATGGCCGGACAGCCTGCCTGACCTCAGCGTCTTCCAGAACCTGCAAGTAATCCGGGGAC |
| | | | | GAATTCTGCACAATGGCGCCTACTCGCTGACCCTGCAAGGGCTGGGCATCAGCTGGCTGGGGCTG |
| | | | | CGCTCACTGAGGGAACTGGGCAGTGGACTGGCCCTCATCCACCATAACACCCACCTCTGCTTCGT |
| | | | | GCACACGGTGCCCTGGGACCAGCTCTTTCGGAACCCGCACCAAGCTCTGCTCCACACTGCCAACC |
| | | | | GGCCAGAGGACGAGTGTGTGGGCGAGGGCCTGGCCTGCCACCAGCTGTGCGCCCGAGGGCACTGC |
| | | | | TGGGGTCCAGGGCCCACCCAGTGTGTCAACTGCAGCCAGTTCCTTCGGGGCCAGGAGTGCGTGGA |
| | | | | GGAATGCCGAGTACTGCAGGGGCTCCCCAGGGAGTATGTGAATGCCAGGCACTGTTTGCCGTGCC |
| | | | | ACCCTGAGTGTCAGCCCCAGAATGGCTCAGTGACCTGTTTTGGACCGGAGGCTGACCAGTGTGTG |
| | | | | GCCTGTGCCCACTATAAGGACCCTCCCTTCTGCGTGGCCCGCTGCCCCAGCGGTGTGAAACCTGA |
| | | | | CCTCTCCTACATGCCCATCTGGAAGTTTCCAGATGAGGAGGGCGCATGCCAGCCTTGCCCCATCA |
| | | | | ACTGCACCCACTCCTGTGTGGACCTGGATGACAAGGGCTGCCCCGCCGAGCAGAGAGCCAGCCCT |
| | | | | CTGACGTCCATCATCTCTGCGGTGGTTGGCATTCTGCTGGTCGTGGTCTTGGGGGTGGTCTTTGG |
| | | | | GATCCTCATCAAGCGACGGCAGCAGAAGATCCGGAAGTACACGATGCGGAGACTGCTGCAGGAAA |
| | | | | CGGAGCTGGTGGAGCCGCTGACACCTAGCGGAGCGATGCCCAACCAGGCGCAGATGCGGATCCTG |
| | | | | AAAGAGACGGAGCTGAGGAAGGTGAAGGTGCTTGGATCTGGCGCTTTTGGCACAGTCTACAAGGG |
| | | | | CATCTGGATCCCTGATGGGGAGAATGTGAAAATTCCAGTGGCCATCAAAGTGTTGAGGGAAAACA |
| | | | | CATCCCCCAAAGCCAACAAAGAAATCTTAGACGAAGCATACGTGATGGCTGGTGTGGGCTCCCCA |
| | | | | TATGTCTCCCGCCTTCTGGGCATCTGCCTGACATCCACGGTGCAGCTGGTGACACAGCTTATGCC |
| | | | | CTATGGCTGCCTCTTAGACCATGTCCGGGAAAACCGCGGACGCCTGGGCTCCCAGGACCTGCTGA |
| | | | | ACTGGTGTATGCAGATTGCCAAGGGGATGAGCTACCTGGAGGATGTGCGGCTCGTACACAGGGAC |
| | | | | TTGGCCGCTCGGAACGTGCTGGTCAAGAGTCCCAACCATGTCAAAATTACAGACTTCGGGCTGGC |
| | | | | TCGGCTGCTGGACATTGACGAGACAGAGTACCATGCAGATGGGGGCAAGGTGCCCATCAAGTGGA |
| | | | | TGGCGCTGGAGTCCATTCTCCGCCGGCGGTTCACCCACCAGAGTGATGTGTGGAGTTATGGTGTG |
| | | | | ACTGTGTGGGAGCTGATGACTTTTGGGGCCAAACCTTACGATGGGATCCCAGCCCGGGAGATCCC |
| | | | | TGACCTGCTGGAAAAGGGGGAGCGGCTGCCCCAGCCCCCCATCTGCACCATTGATGTCTACATGA |
| | | | | TCATGGTCAAATGTTGGATGATTGACTCTGAATGTCGGCCAAGATTCCGGGAGTTGGTGTCTGAA |
| | | | | TTCTCCCGCATGGCCAGGGACCCCCAGCGCTTTGTGGTCATCCAGAATGAGGACTTGGGCCCAGC |
| | | | | CAGTCCCTTGGACAGCACCTTCTACCGCTCACTGCTGGAGGACGATGACATGGGGGACCTGGTGG |
| | | | | ATGCTGAGGAGTATCTGGTACCCCAGCAGGGCTTCTTCTGTCCAGACCCTGCCCCGGGCGCTGGG |
| | | | | GGCATGGTCCACCACAGGCACCGCAGCTCATCTACCAGGAGTGGCGGTGGGGACCTGACACTAGG |
| | | | | GCTGGAGCCCTCTGAAGAGGAGGCCCCCAGGTCTCCACTGGCACCCTCCGAAGGGGCTGGCTCCG |
| | | | | ATGTATTTGATGGTGACCTGGGAATGGGGGCAGCCAAGGGGCTGCAAAGCCTCCCCACACATGAC |
| | | | | CCCAGCCCTCTACAGCGGTACAGTGAGGACCCCACAGTACCCCTGCCCTCTGAGACTGATGGCTA |
| | | | | CGTTGCCCCCCTGACCTGCAGCCCCCAGCCTGAATATGTGAACCAGCCAGATGTTCGGCCCCAGC |
| | | | | CCCCTTCGCCCCGAGAGGGCCCTCTGCCTGCTGCCCGACCTGCTGGTGCCACTCTGGAAAGGCCC |
| | | | | AAGACTCTCTCCCCAGGGAAGAATGGGGTCGTCAAAGACGTTTTTGCCTTTGGGGGTGCCGTGGA |
| | | | | GAACCCCGAGTACTTGACACCCCAGGGAGGAGCTGCCCCTCAGCCCCACCCTCCTCCTGCCTTCA |
| | | | | GCCCAGCCTTCGACAACCTCTATTACTGGGACCAGGACCCACCAGAGCGGGGGGCTCCACCCAGC |
| | | | | ACCTTCAAAGGGACACCTACGGCAGAGAACCCAGAGTACCTGGGTCTGGACGTGCCAGTGTGA |
| 460 | human HER2 | human | aa | MELAALCRWGLLLALLPPGAASTQVCTGTDMKLRLPASPETHLDMLRHLYQGCQVVQGNLELTYL |
| | protein | | | PTNASLSFLQDIQEVQGYVLIAHNQVRQVPLQRLRIVRGTQLFEDNYALAVLDNGDPLNNTTPVT |
| | | | | GASPGGLRELQLRSLTEILKGGVLIQRNPQLCYQDTILWKDIFHKNNQLALTLIDTNRSRACHPC |
| | | | | SPMCKGSRCWGESSEDCQSLTRTVCAGGCARCKGPLPTDCCHEQCAAGCTGPKHSDCLACLHFNH |
| | | | | SGICELHCPALVTYNTDTFESMPNPEGRYTFGASCVTACPYNYLSTDVGSCTLVCPLHNQEVTAE |
| | | | | DGTQRCEKCSKPCARVCYGLGMEHLREVRAVTSANIQEFAGCKKIFGSLAFLPESFDGDPASNTA |
| | | | | PLQPEQLQVFETLEEITGYLYISAWPDSLPDLSVFQNLQVIRGRILHNGAYSLTLQGLGISWLGL |
| | | | | RSLRELGSGLALIHHNTHLCFVHTVPWDQLFRNPHQALLHTANRPEDECVGEGLACHQLCARGHC |
| | | | | WGPGPTQCVNCSQFLRGQECVEECRVLQGLPREYVNARHCLPCHPECQPQNGSVTCFGPEADQCV |
| | | | | ACAHYKDPPFCVARCPSGVKPDLSYMPIWKFPDEEGACQPCPINCTHSCVDLDDKGCPAEQRASP |
| | | | | LTSIISAVVGILLVVVLGVVFGILIKRRQQKIRKYTMRRLLQETELVEPLTPSGAMPNQAQMRIL |
| | | | | KETELRKVKVLGSGAFGTVYKGIWIPDGENVKIPVAIKVLRENTSPKANKEILDEAYVMAGVGSP |
| | | | | YVSRLLGICLTSTVQLVTQLMPYGCLLDHVRENRGRLGSQDLLNWCMQIAKGMSYLEDVRLVHRD |
| | | | | LAARNVLVKSPNHVKITDFGLARLLDIDETEYHADGGKVPIKWMALESILRRRFTHQSDVWSYGV |
| | | | | TVWELMTFGAKPYDGIPAREIPDLLEKGERLPQPPICTIDVYMIMVKCWMIDSECRPRFRELVSE |
| | | | | FSRMARDPQRFVVIQNEDLGPASPLDSTFYRSLLEDDDMGDLVDAEEYLVPQQGFFCPDPAPGAG |
| | | | | GMVHHRHRSSSTRSGGGDLTLGLEPSEEEAPRSPLAPSEGAGSDVFDGDLGMGAAKGLQSLPTHD |
| | | | | PSPLQRYSEDPTVPLPSETDGYVAPLTCSPQPEYVNQPDVRPQPPSPREGPLPAARPAGATLERP |
| | | | | KTLSPGKNGVVKDVFAFGGAVENPEYLTPQGGAAPQPHPPPAFSPAFDNLYYWDQDPPERGAPPS |
| | | | | TFKGTPTAENPEYLGLDVPV |
| 461 | chimeric human/ | artificial | nt | ATGGAGCTGGCGGCCTTGTGCCGCTGGGGGCTCCTCCTCGCCCTCTTGCCCCCCGGAGCCGCGAG |
| | macaque HER2 | | | CACCCAAGTGTGCACCGGCACAGACATGAAGCTGCGGCTCCCTGCCAGTCCCGAGACCCACCTGG |
| | protein | | | ACATGCTCCGCCACCTCTACCAGGGCTGCCAGGTGGTGCAGGGAAACCTGGAACTCACCTACCTG |
| | | | | CCCACCAATGCCAGCCTGTCCTTCCTGCAGGATATCCAGGAGGTGCAGGGCTACGTGCTCATCGC |
| | | | | TCACAACCAAGTGAGGCAGGTCCCACTGCAGAGGCTGCGGATTGTGCGAGGCACCCAGCTCTTTG |
| | | | | AGGACAACTATGCCCTGGCCGTGCTAGACAATGGAGACCCGCTGAACAATACCACCCCTGTCACA |
| | | | | GGGGCCTCCCCAGGAGGCCTGCGGGAGCTGCAGCTTCGAAGCCTCACAGAGATCTTGAAAGGAGG |
| | | | | GGTCTTGATCCAGCGGAACCCCCAGCTCTGCTACCAGGACACGATTTTGTGGAAGGACATCTTCC |
| | | | | ACAAGAACAACCAGCTGGCTCTCACACTGATAGACACCAACCGCTCTCGGGCCTGCCACCCCTGT |
| | | | | TCTCCAGTGTGTAAGGGCTCCCGCTGCTGGGGAGAGAGTTCTGAGGATTGTCAGAGCCTGACGCG |
| | | | | CACTGTCTGTGCCGGTGGCTGTGCCCGCTGCAAGGGGCCACTGCCCACTGACTGCTGCCATGAGC |
| | | | | AGTGTGCTGCCGGCTGCACGGGCCCCAAGCACTCTGACTGCCTGGCCTGCCTCCACTTCAACCAC |
| | | | | AGTGGCATCTGTGAGCTGCACTGCCCAGCCCTGGTCACCTACAACACAGACACGTTTGAGTCCAT |
| | | | | GCCCAATCCCGAGGGCCGGTATACATTCGGCGCCAGCTGTGTGACTGCCTGTCCCTACAACTACC |
| | | | | TTTCTACGGACGTGGGATCCTGCACCCTCGTCTGCCCCCTGCACAACCAAGAGGTGACAGCAGAG |
| | | | | GATGGAACACAGCGGTGTGAGAAGTGCAGCAAGCCCTGTGCCCGAGTGTGCTATGGTCTGGGCAT |
| | | | | GGAGCACTTGCGAGAGGTGAGGGCAGTTACCAGTGCCAATATCCAGGAGTTTGCTGGCTGCAAGA |
| | | | | AGATCTTTGGGAGCCTGGCATTTCTGCCGGAAAGCTTTGATGGGGACCCAGCCTCCAACACTGCC |
| | | | | CCGCTTCAGCCGGAGCAGCTCCGAGTGTTTGAGACTCTGGAAGAGATCACAGGTTACCTATACAT |
| | | | | CTCAGCATGGCCAGACAGCCTGCCTGACCTTAGCGTCCTCCAGAACCTGCAAGTAATCCGGGGAC |
| | | | | GAATTCTGCACAATGGCGCCTACTCGCTGACCCTGCAAGGGCTGGGCATCAGCTGGCTGGGGCTG |
| | | | | CGCTCACTGAGGGAACTGGGCAGTGGACTGGCCCTCATCCACCATAACACCCGCCTCTGCTTTGT |
| | | | | GCACACGGTGCCCTGGGACCAGCTCTTTCGGAACCCGCACCAAGCTCTGCTCCACACTGCCAACC |
| | | | | GGCCAGAGGACGAGTGTGTGGGCGAGGGCCTGGCCTGCCACCAGCTGTGCGCCCGAGGGCACTGC |
| | | | | TGGGGTCCAGGGCCCACCCAGTGTGTCAACTGCAGCCAGTTCCTTCGGGGCCAGGAGTGCGTGGA |
| | | | | GGAATGCCGAGTACTGCAGGGGCTCCCCAGGGAGTATGTGAATGCCAGGCACTGTTTGCCGTGCC |
| | | | | ACCCTGAGTGTCAGCCCCAGAATGGCTCAGTGACCTGTTTTGGACCGGAGGCTGACCAGTGTGTG |
| | | | | GCCTGTGCCCACTATAAGGACCCTCCCTTCTGCGTGGCCCGCTGCCCCAGCGGTGTGAAACCTGA |
| | | | | CCTCTCCTACATGCCCATCTGGAAGTTTCCAGATGAGGAGGGCACGTGCCAGTCTTGCCCCATCA |
| | | | | ACTGCACCCACTCCTGTGTGGACCTGGATGACAAGGGCTGCCCCGCCGAGCAGAGAGCCAGCCCT |
| | | | | CTGACTAGTATCATCTCTGCGGTGGTTGGCATTCTGCTGGTCGTGGTCTTGGGGGTGGTCTTTGG |
| | | | | GATCCTCATCAAGCGACGGCAGCAGAAGATCCGGAAGTACACGATGCGGAGACTGCTGCAGGAAA |
| | | | | CGGAGCTGGTGGAGCCGCTGACACCTAGCGGAGCGATGCCCAACCAGGCGCAGATGCGGATCCTG |
| | | | | AAAGAGACGGAGCTGAGGAAGGTGAAGGTGCTTGGATCTGGCGCTTTTGGCACAGTCTACAAGGG |
| | | | | CATCTGGATCCCTGATGGGGAGAATGTGAAAATTCCAGTGGCCATCAAAGTGTTGAGGGAAAACA |
| | | | | CATCCCCCAAAGCCAACAAAGAAATCTTAGACGAAGCATACGTGATGGCTGGTGTGGGCTCCCCA |
| | | | | TATGTCTCCCGCCTTCTGGGCATCTGCCTGACATCCACGGTGCAGCTGGTGACACAGCTTATGCC |
| | | | | CTATGGCTGCCTCTTAGACCATGTCCGGGAAAACCGCGGACGCCTGGGCTCCCAGGACCTGCTGA |
| | | | | ACTGGTGTATGCAGATTGCCAAGGGGATGAGCTACCTGGAGGATGTGCGGCTCGTACACAGGGAC |
| | | | | TTGGCCGCTCGGAACGTGCTGGTCAAGAGTCCCAACCATGTCAAAATTACAGACTTCGGGCTGGC |
| | | | | TCGGCTGCTGGACATTGACGAGACAGAGTACCATGCAGATGGGGGCAAGGTGCCCATCAAGTGGA |
| | | | | TGGCGCTGGAGTCCATTCTCCGCCGGCGGTTCACCCACCAGAGTGATGTGTGGAGTTATGGTGTG |
| | | | | ACTGTGTGGGAGCTGATGACTTTTGGGGCCAAACCTTACGATGGGATCCCAGCCCGGGAGATCCC |
| | | | | TGACCTGCTGGAAAAGGGGGAGCGGCTGCCCCAGCCCCCCATCTGCACCATTGATGTCTACATGA |
| | | | | TCATGGTCAAATGTTGGATGATTGACTCTGAATGTCGGCCAAGATTCCGGGAGTTGGTGTCTGAA |
| | | | | TTCTCCCGCATGGCCAGGGACCCCCAGCGCTTTGTGGTCATCCAGAATGAGGACTTGGGCCCAGC |
| | | | | CAGTCCCTTGGACAGCACCTTCTACCGCTCACTGCTGGAGGACGATGACATGGGGGACCTGGTGG |
| | | | | ATGCTGAGGAGTATCTGGTACCCCAGCAGGGCTTCTTCTGTCCAGACCCTGCCCCGGGCGCTGGG |
| | | | | GGCATGGTCCACCACAGGCACCGCAGCTCATCTACCAGGAGTGGCGGTGGGGACCTGACACTAGG |
| | | | | GCTGGAGCCCTCTGAAGAGGAGGCCCCCAGGTCTCCACTGGCACCCTCCGAAGGGGCTGGCTCCG |
| | | | | ATGTATTTGATGGTGACCTGGGAATGGGGGCAGCCAAGGGGCTGCAAAGCCTCCCCACACATGAC |
| | | | | CCCAGCCCTCTACAGCGGTACAGTGAGGACCCCACAGTACCCCTGCCCTCTGAGACTGATGGCTA |
| | | | | CGTTGCCCCCCTGACCTGCAGCCCCCAGCCTGAATATGTGAACCAGCCAGATGTTCGGCCCCAGC |
| | | | | CCCCTTCGCCCCGAGAGGGCCCTCTGCCTGCTGCCCGACCTGCTGGTGCCACTCTGGAAAGGCCC |
| | | | | AAGACTCTCTCCCCAGGGAAGAATGGGGTCGTCAAAGACGTTTTTGCCTTTGGGGGTGCCGTGGA |
| | | | | GAACCCCGAGTACTTGACACCCCAGGGAGGAGCTGCCCCTCAGCCCCACCCTCCTCCTGCCTTCA |
| | | | | GCCCAGCCTTCGACAACCTCTATTACTGGGACCAGGACCCACCAGAGCGGGGGGCTCCACCCAGC |
| | | | | ACCTTCAAAGGGACACCTACGGCAGAGAACCCAGAGTACCTGGGTCTGGACGTGCCAGTGTGA |
| 462 | chimeric human/ | artificial | aa | MELAALCRWGLLLALLPPGAASTQVCTGTDMKLRLPASPETHLDMLRHLYQGCQVVQGNLELTYL |
| | macaque HER2 | | | PTNASLSFLQDIQEVQGYVLIAHNQVRQVPLQRLRIVRGTQLFEDNYALAVLDNGDPLNNTTPVT |
| | protein | | | GASPGGLRELQLRSLTEILKGGVLIQRNPQLCYQDTILWKDIFHKNNQLALTLIDTNRSRACHPC |
| | | | | SPVCKGSRCWGESSEDCQSLTRTVCAGGCARCKGPLPTDCCHEQCAAGCTGPKHSDCLACLHFNH |
| | | | | SGICELHCPALVTYNTDTFESMPNPEGRYTFGASCVTACPYNYLSTDVGSCTLVCPLHNQEVTAE |
| | | | | DGTQRCEKCSKPCARVCYGLGMEHLREVRAVTSANIQEFAGCKKIFGSLAFLPESFDGDPASNTA |
| | | | | PLQPEQLRVFETLEEITGYLYISAWPDSLPDLSVLQNLQVIRGRILHNGAYSLTLQGLGISWLGL |
| | | | | RSLRELGSGLALIHHNTRLCFVHTVPWDQLFRNPHQALLHTANRPEDECVGEGLACHQLCARGHC |
| | | | | WGPGPTQCVNCSQFLRGQECVEECRVLQGLPREYVNARHCLPCHPECQPQNGSVTCFGPEADQCV |
| | | | | ACAHYKDPPFCVARCPSGVKPDLSYMPIWKFPDEEGTCQSCPINCTHSCVDLDDKGCPAEQRASP |
| | | | | LTSIISAVVGILLVVVLGVVFGILIKRRQQKIRKYTMRRLLQETELVEPLTPSGAMPNQAQMRIL |
| | | | | KETELRKVKVLGSGAFGTVYKGIWIPDGENVKIPVAIKVLRENTSPKANKEILDEAYVMAGVGSP |
| | | | | YVSRLLGICLTSTVQLVTQLMPYGCLLDHVRENRGRLGSQDLLNWCMQIAKGMSYLEDVRLVHRD |
| | | | | LAARNVLVKSPNHVKITDFGLARLLDIDETEYHADGGKVPIKWMALESILRRRFTHQSDVWSYGV |
| | | | | TVWELMTFGAKPYDGIPAREIPDLLEKGERLPQPPICTIDVYMIMVKCWMIDSECRPRFRELVSE |
| | | | | FSRMARDPQRFVVIQNEDLGPASPLDSTFYRSLLEDDDMGDLVDAEEYLVPQQGFFCPDPAPGAG |
| | | | | GMVHHRHRSSSTRSGGGDLTLGLEPSEEEAPRSPLAPSEGAGSDVFDGDLGMGAAKGLQSLPTHD |
| | | | | PSPLQRYSEDPTVPLPSETDGYVAPLTCSPQPEYVNQPDVRPQPPSPREGPLPAARPAGATLERP |
| | | | | KTLSPGKNGVVKDVFAFGGAVENPEYLTPQGGAAPQPHPPPAFSPAFDNLYYWDQDPPERGAPPS |
| | | | | TFKGTPTAENPEYLGLDVPV |
| 463 | HCDR1 of | artificial | aa | DTYIH |
| | Her2/neu | | | |
| 464 | HCDR2 of | artificial | aa | RIYPTNGYTRYADSVKG |
| | Her2/neu | | | |
| 465 | HCDR3 of | artificial | aa | WGGDGFYAMDY |
| | Her2/neu | | | |
| 466 | LCDR1 of | artificial | aa | RASQDVNTAVA |
| | Her2/neu | | | |
| 467 | LCDR2 of | artificial | aa | SASFLYS |
| | Her2/neu | | | |
| 468 | LCDR3 of | artificial | aa | QQHYTTPPT |
| | Her2/neu | | | |
| 469 | Her2/neu HL × | artificial | aa | EVQLVESGGGLVQPGGSLRLSCAASGFNIKDTYIHWVRQAPGKGLEWVARIYPTNGYTRYADSVK |
| | H2C HL | | | GRFTISADTSKNTAYLQMNSLRAEDTAVYYCSRWGGDGFYAMDYWGQGTLVTVSSGGGGSGGGGS |
| | | | | GGGGSDIQMTQSPSSLSASVGDRVTITCRASQDVNTAVAWYQQKPGKAPKLLIYSASFLYSGVPS |
| | | | | RFSGSRSGTDFTLTISSLQPEDFATYYCQQHYTTPPTFGQGTKVEIKSGGGGSEVQLVESGGGLV |
| | | | | QPGGSLKLSCAASGFTFNKYAMNWVRQAPGKGLEWVARIRSKYNNYATYYADSVKDRFTISRDDS |
| | | | | KNTAYLQMNNLKTEDTAVYYCVRHGNFGNSYISYWAYWGQGTLVTVSSGGGGSGGGGSGGGGSQT |
| | | | | VVTQEPSLTVSPGGTVTLTCGSSTGAVTSGYYPNWVQQKPGQAPRGLIGGTKFLAPGTPARFSGS |
| | | | | LLGGKAALTLSGVQPEDEAEYYCALWYSNRWVFGGGTKLTVL |
| 470 | Her2/neu HL × | artificial | nt | GAGGTTCAGCTGGTGGAGTCTGGCGGTGGCCTGGTGCAGCCAGGGGGCTCACTCCGTTTGTCCTG |
| | H2C HL | | | TGCAGCTTCTGGCTTCAACATTAAAGACACCTATATACACTGGGTGCGTCAGGCCCCGGGTAAGG |
| | | | | GCCTGGAATGGGTTGCAAGGATTTATCCTACGAATGGTTATACTAGATATGCCGATAGCGTCAAG |
| | | | | GGCCGTTTCACTATAAGCGCAGACACATCCAAAAACACAGCCTACCTGCAGATGAACAGCCTGCG |
| | | | | TGCTGAGGACACTGCCGTCTATTATTGTTCTAGGTGGGGAGGGGACGGCTTCTATGCTATGGACT |
| | | | | ATTGGGGTCAAGGAACCCTGGTCACTGTCTCCTCCGGTGGTGGTGGTTCTGGCGGCGGCGGCTCC |
| | | | | GGTGGTGGTGGTTCTGACATCCAGATGACCCAGTCCCCTAGCTCCCTGTCCGCCTCTGTGGGCGA |
| | | | | TAGGGTCACCATCACCTGCCGTGCCAGTCAGGATGTGAATACTGCTGTAGCCTGGTATCAACAGA |
| | | | | AACCAGGAAAAGCTCCGAAACTACTGATTTACTCGGCATCCTTCCTCTACTCTGGAGTCCCTTCT |
| | | | | CGCTTCTCTGGATCCAGATCTGGGACGGATTTCACTCTGACCATCAGCAGTCTGCAGCCGGAAGA |
| | | | | CTTCGCAACTTATTACTGTCAGCAACATTATACTACTCCTCCCACGTTCGGACAGGGTACCAAGG |
| | | | | TGGAGATCAAATCCGGAGGTGGTGGATCCGAGGTGCAGCTGGTCGAGTCTGGAGGAGGATTGGTG |
| | | | | CAGCCTGGAGGGTCATTGAAACTCTCATGTGCAGCCTCTGGATTCACCTTCAATAAGTACGCCAT |
| | | | | GAACTGGGTCCGCCAGGCTCCAGGAAAGGGTTTGGAATGGGTTGCTCGCATAAGAAGTAAATATA |
| | | | | ATAATTATGCAACATATTATGCCGATTCAGTGAAAGACAGGTTCACCATCTCCAGAGATGATTCA |
| | | | | AAAAACACTGCCTATCTACAAATGAACAACTTGAAAACTGAGGACACTGCCGTGTACTACTGTGT |
| | | | | GAGACATGGGAACTTCGGTAATAGCTACATATCCTACTGGGCTTACTGGGGCCAAGGGACTCTGG |
| | | | | TCACCGTCTCCTCAGGTGGTGGTGGTTCTGGCGGCGGCGGCTCCGGTGGTGGTGGTTCTCAGACT |
| | | | | GTTGTGACTCAGGAACCTTCACTCACCGTATCACCTGGTGGAACAGTCACACTCACTTGTGGCTC |
| | | | | CTCGACTGGGGCTGTTACATCTGGCTACTACCCAAACTGGGTCCAACAAAAACCAGGTCAGGCAC |
| | | | | CCCGTGGTCTAATAGGTGGGACTAAGTTCCTCGCCCCCGGTACTCCTGCCAGATTCTCAGGCTCC |
| | | | | CTGCTTGGAGGCAAGGCTGCCCTCACCCTCTCAGGGGTACAGCCAGAGGATGAGGCAGAATATTA |
| | | | | CTGTGCTCTATGGTACAGCAACCGCTGGGTGTTCGGTGGAGGAACCAAACTGACTGTCCTA |
| 471 | Her2/neu HL × | artificial | aa | EVQLVESGGGLVQPGGSLRLSCAASGFNIKDTYIHWVRQAPGKGLEWVARIYPTNGYTRYADSVK |
| | F12Q HL | | | GRFTISADTSKNTAYLQMNSLRAEDTAVYYCSRWGGDGFYAMDYWGQGTLVTVSSGGGGSGGGGS |
| | | | | GGGGSDIQMTQSPSSLSASVGDRVTITCRASQDVNTAVAWYQQKPGKAPKLLIYSASFLYSGVPS |
| | | | | RFSGSRSGTDFTLTISSLQPEDFATYYCQQHYTTPPTFGQGTKVEIKSGGGGSEVQLVESGGGLV |
| | | | | QPGGSLKLSCAASGFTFNSYAMNWVRQAPGKGLEWVARIRSKYNNYATYYADSVKGRFTISRDDS |
| | | | | KNTAYLQMNNLKTEDTAVYYCVRHGNFGNSYVSWWAYWGQGTLVTVSSGGGGSGGGGSGGGGSQT |
| | | | | VVTQEPSLTVSPGGTVTLTCGSSTGAVTSGNYPNWVQQKPGQAPRGLIGGTKFLAPGTPARFSGS |
| | | | | LLGGKAALTLSGVQPEDEAEYYCVLWYSNRWVFGGGTKLTVL |
| 472 | Her2/neu HL × | artificial | nt | GAGGTTCAGCTGGTGGAGTCTGGCGGTGGCCTGGTGCAGCCAGGGGGCTCACTCCGTTTGTCCTG |
| | F12Q HL | | | TGCAGCTTCTGGCTTCAACATTAAAGACACCTATATACACTGGGTGCGTCAGGCCCCGGGTAAGG |
| | | | | GCCTGGAATGGGTTGCAAGGATTTATCCTACGAATGGTTATACTAGATATGCCGATAGCGTCAAG |
| | | | | GGCCGTTTCACTATAAGCGCAGACACATCCAAAAACACAGCCTACCTGCAGATGAACAGCCTGCG |
| | | | | TGCTGAGGACACTGCCGTCTATTATTGTTCTAGGTGGGGAGGGGACGGCTTCTATGCTATGGACT |
| | | | | ATTGGGGTCAAGGAACCCTGGTCACTGTCTCCTCCGGTGGTGGTGGTTCTGGCGGCGGCGGCTCC |
| | | | | GGTGGTGGTGGTTCTGACATCCAGATGACCCAGTCCCCTAGCTCCCTGTCCGCCTCTGTGGGCGA |
| | | | | TAGGGTCACCATCACCTGCCGTGCCAGTCAGGATGTGAATACTGCTGTAGCCTGGTATCAACAGA |
| | | | | AACCAGGAAAAGCTCCGAAACTACTGATTTACTCGGCATCCTTCCTCTACTCTGGAGTCCCTTCT |
| | | | | CGCTTCTCTGGATCCAGATCTGGGACGGATTTCACTCTGACCATCAGCAGTCTGCAGCCGGAAGA |
| | | | | CTTCGCAACTTATTACTGTCAGCAACATTATACTACTCCTCCCACGTTCGGACAGGGTACCAAGG |
| | | | | TGGAGATCAAATCCGGAGGTGGTGGATCCGAGGTGCAGCTGGTCGAGTCTGGAGGAGGATTGGTG |
| | | | | CAGCCTGGAGGGTCATTGAAACTCTCATGTGCAGCCTCTGGATTCACCTTCAATAGCTACGCCAT |
| | | | | GAACTGGGTCCGCCAGGCTCCAGGAAAGGGTTTGGAATGGGTTGCTCGCATAAGAAGTAAATATA |
| | | | | ATAATTATGCAACATATTATGCCGATTCAGTGAAAGGCAGGTTCACCATCTCCAGAGATGATTCA |
| | | | | AAAAACACTGCCTATCTACAAATGAACAACTTGAAAACTGAGGACACTGCCGTGTACTACTGTGT |
| | | | | GAGACATGGGAACTTCGGTAATAGCTACGTTTCCTGGTGGGCTTACTGGGGCCAAGGGACTCTGG |
| | | | | TCACCGTCTCCTCAGGTGGTGGTGGTTCTGGCGGCGGCGGCTCCGGTGGTGGTGGTTCTCAGACT |
| | | | | GTTGTGACTCAGGAACCTTCACTCACCGTATCACCTGGTGGAACAGTCACACTCACTTGTGGCTC |
| | | | | CTCGACTGGGGCTGTTACATCTGGCAACTACCCAAACTGGGTCCAACAAAAACCAGGTCAGGCAC |
| | | | | CCCGTGGTCTAATAGGTGGGACTAAGTTCCTCGCCCCCGGTACTCCTGCCAGATTCTCAGGCTCC |
| | | | | CTGCTTGGAGGCAAGGCTGCCCTCACCCTCTCAGGGGTACAGCCAGAGGATGAGGCAGAATATTA |
| | | | | CTGTGTTCTATGGTACAGCAACCGCTGGGTGTTCGGTGGAGGAACCAAACTGACTGTCCTA |
| 473 | Her2/neu HL × | artificial | aa | EVQLVESGGGLVQPGGSLRLSCAASGFNIKDTYIHWVRQAPGKGLEWVARIYPTNGYTRYADSVK |
| | I2C HL | | | GRFTISADTSKNTAYLQMNSLRAEDTAVYYCSRWGGDGFYAMDYWGQGTLVTVSSGGGGSGGGGS |
| | | | | GGGGSDIQMTQSPSSLSASVGDRVTITCRASQDVNTAVAWYQQKPGKAPKLLIYSASFLYSGVPS |
| | | | | RFSGSRSGTDFTLTISSLQPEDFATYYCQQHYTTPPTFGQGTKVEIKSGGGGSEVQLVESGGGLV |
| | | | | QPGGSLKLSCAASGFTFNKYAMNWVRQAPGKGLEWVARIRSKYNNYATYYADSVKDRFTISRDDS |
| | | | | KNTAYLQMNNLKTEDTAVYYCVRHGNFGNSYISYWAYWGQGTLVTVSSGGGGSGGGGSGGGGSQT |
| | | | | VVTQEPSLTVSPGGTVTLTCGSSTGAVTSGNYPNWVQQKPGQAPRGLIGGTKFLAPGTPARFSGS |
| | | | | LLGGKAALTLSGVQPEDEAEYYCVLWYSNRWVFGGGTKLTVL |
| 474 | Her2/neu HL × | artificial | nt | GAGGTTCAGCTGGTGGAGTCTGGCGGTGGCCTGGTGCAGCCAGGGGGCTCACTCCGTTTGTCCTG |
| | I2C HL | | | TGCAGCTTCTGGCTTCAACATTAAAGACACCTATATACACTGGGTGCGTCAGGCCCCGGGTAAGG |
| | | | | GCCTGGAATGGGTTGCAAGGATTTATCCTACGAATGGTTATACTAGATATGCCGATAGCGTCAAG |
| | | | | GGCCGTTTCACTATAAGCGCAGACACATCCAAAAACACAGCCTACCTGCAGATGAACAGCCTGCG |
| | | | | TGCTGAGGACACTGCCGTCTATTATTGTTCTAGGTGGGGAGGGGACGGCTTCTATGCTATGGACT |
| | | | | ATTGGGGTCAAGGAACCCTGGTCACTGTCTCCTCCGGTGGTGGTGGTTCTGGCGGCGGCGGCTCC |
| | | | | GGTGGTGGTGGTTCTGACATCCAGATGACCCAGTCCCCTAGCTCCCTGTCCGCCTCTGTGGGCGA |
| | | | | TAGGGTCACCATCACCTGCCGTGCCAGTCAGGATGTGAATACTGCTGTAGCCTGGTATCAACAGA |
| | | | | AACCAGGAAAAGCTCCGAAACTACTGATTTACTCGGCATCCTTCCTCTACTCTGGAGTCCCTTCT |
| | | | | CGCTTCTCTGGATCCAGATCTGGGACGGATTTCACTCTGACCATCAGCAGTCTGCAGCCGGAAGA |
| | | | | CTTCGCAACTTATTACTGTCAGCAACATTATACTACTCCTCCCACGTTCGGACAGGGTACCAAGG |
| | | | | TGGAGATCAAATCCGGAGGTGGTGGATCCGAGGTGCAGCTGGTCGAGTCTGGAGGAGGATTGGTG |
| | | | | CAGCCTGGAGGGTCATTGAAACTCTCATGTGCAGCCTCTGGATTCACCTTCAATAAGTACGCCAT |
| | | | | GAACTGGGTCCGCCAGGCTCCAGGAAAGGGTTTGGAATGGGTTGCTCGCATAAGAAGTAAATATA |
| | | | | ATAATTATGCAACATATTATGCCGATTCAGTGAAAGACAGGTTCACCATCTCCAGAGATGATTCA |
| | | | | AAAAACACTGCCTATCTACAAATGAACAACTTGAAAACTGAGGACACTGCCGTGTACTACTGTGT |
| | | | | GAGACATGGGAACTTCGGTAATAGCTACATATCCTACTGGGCTTACTGGGGCCAAGGGACTCTGG |
| | | | | TCACCGTCTCCTCAGGTGGTGGTGGTTCTGGCGGCGGCGGCTCCGGTGGTGGTGGTTCTCAGACT |
| | | | | GTTGTGACTCAGGAACCTTCACTCACCGTATCACCTGGTGGAACAGTCACACTCACTTGTGGCTC |
| | | | | CTCGACTGGGGCTGTTACATCTGGCAACTACCCAAACTGGGTCCAACAAAAACCAGGTCAGGCAC |
| | | | | CCCGTGGTCTAATAGGTGGGACTAAGTTCCTCGCCCCCGGTACTCCTGCCAGATTCTCAGGCTCC |
| | | | | CTGCTTGGAGGCAAGGCTGCCCTCACCCTCTCAGGGGTACAGCCAGAGGATGAGGCAGAATATTA |
| | | | | CTGTGTTCTATGGTACAGCAACCGCTGGGTGTTCGGTGGAGGAACCAAACTGACTGTCCTA |
| 475 | H2C HL × | artificial | aa | EVQLVESGGGLVQPGGSLKLSCAASGFTFNKYAMNWVRQAPGKGLEWVARIRSKYNNYATYYADS |
| | Her2/neu LH | | | VKDRFTISRDDSKNTAYLQMNNLKTEDTAVYYCVRHGNFGNSYISYWAYWGQGTLVTVSSGGGGS |
| | | | | GGGGSGGGGSQTVVTQEPSLTVSPGGTVTLTCGSSTGAVTSGYYPNWVQQKPGQAPRGLIGGTKF |
| | | | | LAPGTPARFSGSLLGGKAALTLSGVQPEDEAEYYCALWYSNRWVFGGGTKLTVLSGGGGSDIQMT |
| | | | | QSPSSLSASVGDRVTITCRASQDVNTAVAWYQQKPGKAPKLLIYSASFLYSGVPSRFSGSRSGTD |
| | | | | FTLTISSLQPEDFATYYCQQHYTTPPTFGQGTKVEIKGGGGSGGGGSGGGGSEVQLVESGGGLVQ |
| | | | | PGGSLRLSCAASGFNIKDTYIHWVRQAPGKGLEWVARIYPTNGYTRYADSVKGRFTISADTSKNT |
| | | | | AYLQMNSLRAEDTAVYYCSRWGGDGFYAMDYWGQGTLVTVSS |
| 476 | H2C HL × | artificial | nt | GAGGTGCAGCTGGTCGAGTCTGGAGGAGGATTGGTGCAGCCTGGAGGGTCATTGAAACTCTCATG |
| | Her2/neu LH | | | TGCAGCCTCTGGATTCACCTTCAATAAGTACGCCATGAACTGGGTCCGCCAGGCTCCAGGAAAGG |
| | | | | GTTTGGAATGGGTTGCTCGCATAAGAAGTAAATATAATAATTATGCAACATATTATGCCGATTCA |
| | | | | GTGAAAGACAGGTTCACCATCTCCAGAGATGATTCAAAAAACACTGCCTATCTACAAATGAACAA |
| | | | | CTTGAAAACTGAGGACACTGCCGTGTACTACTGTGTGAGACATGGGAACTTCGGTAATAGCTACA |
| | | | | TATCCTACTGGGCTTACTGGGGCCAAGGGACTCTGGTCACCGTCTCCTCAGGTGGTGGTGGTTCT |
| | | | | GGCGGCGGCGGCTCCGGTGGTGGTGGTTCTCAGACTGTTGTGACTCAGGAACCTTCACTCACCGT |
| | | | | ATCACCTGGTGGAACAGTCACACTCACTTGTGGCTCCTCGACTGGGGCTGTTACATCTGGCTACT |
| | | | | ACCCAAACTGGGTCCAACAAAAACCAGGTCAGGCACCCCGTGGTCTAATAGGTGGGACTAAGTTC |
| | | | | CTCGCCCCCGGTACTCCTGCCAGATTCTCAGGCTCCCTGCTTGGAGGCAAGGCTGCCCTCACCCT |
| | | | | CTCAGGGGTACAGCCAGAGGATGAGGCAGAATATTACTGTGCTCTATGGTACAGCAACCGCTGGG |
| | | | | TGTTCGGTGGAGGAACCAAACTGACTGTCCTATCCGGAGGTGGTGGATCCGACATCCAGATGACC |
| | | | | CAGTCCCCTAGCTCCCTGTCCGCCTCTGTGGGCGATAGGGTCACCATCACCTGCCGTGCCAGTCA |
| | | | | GGATGTGAATACTGCTGTAGCCTGGTATCAACAGAAACCAGGAAAAGCTCCGAAACTACTGATTT |
| | | | | ACTCGGCATCCTTCCTCTACTCTGGAGTCCCTTCTCGCTTCTCTGGATCCAGATCTGGGACGGAT |
| | | | | TTCACTCTGACCATCAGCAGTCTGCAGCCGGAAGACTTCGCAACTTATTACTGTCAGCAACATTA |
| | | | | TACTACTCCTCCCACGTTCGGACAGGGTACCAAGGTGGAGATCAAAGGTGGTGGTGGTTCTGGCG |
| | | | | GCGGCGGCTCCGGTGGTGGTGGTTCTGAGGTTCAGCTGGTGGAGTCTGGCGGTGGCCTGGTGCAG |
| | | | | CCAGGGGGCTCACTCCGTTTGTCCTGTGCAGCTTCTGGCTTCAACATTAAAGACACCTATATACA |
| | | | | CTGGGTGCGTCAGGCCCCGGGTAAGGGCCTGGAATGGGTTGCAAGGATTTATCCTACGAATGGTT |
| | | | | ATACTAGATATGCCGATAGCGTCAAGGGCCGTTTCACTATAAGCGCAGACACATCCAAAAACACA |
| | | | | GCCTACCTGCAGATGAACAGCCTGCGTGCTGAGGACACTGCCGTCTATTATTGTTCTAGGTGGGG |
| | | | | AGGGGACGGCTTCTATGCTATGGACTATTGGGGTCAAGGAACCCTGGTCACTGTCTCCTCC |
| 477 | F12Q HL × | artificial | aa | EVQLVESGGGLVQPGGSLKLSCAASGFTFNSYAMNWVRQAPGKGLEWVARIRSKYNNYATYYADS |
| | Her2/neu LH | | | VKGRFTISRDDSKNTAYLQMNNLKTEDTAVYYCVRHGNFGNSYVSWWAYWGQGTLVTVSSGGGGS |
| | | | | GGGGSGGGGSQTVVTQEPSLTVSPGGTVTLTCGSSTGAVTSGNYPNWVQQKPGQAPRGLIGGTKF |
| | | | | LAPGTPARFSGSLLGGKAALTLSGVQPEDEAEYYCVLWYSNRWVFGGGTKLTVLSGGGGSDIQMT |
| | | | | QSPSSLSASVGDRVTITCRASQDVNTAVAWYQQKPGKAPKLLIYSASFLYSGVPSRFSGSRSGTD |
| | | | | FTLTISSLQPEDFATYYCQQHYTTPPTFGQGTKVEIKGGGGSGGGGSGGGGSEVQLVESGGGLVQ |
| | | | | PGGSLRLSCAASGFNIKDTYIHWVRQAPGKGLEWVARIYPTNGYTRYADSVKGRFTISADTSKNT |
| | | | | AYLQMNSLRAEDTAVYYCSRWGGDGFYAMDYWGQGTLVTVSS |
| 478 | F12Q HL × | artificial | nt | GAGGTGCAGCTGGTCGAGTCTGGAGGAGGATTGGTGCAGCCTGGAGGGTCATTGAAACTCTCATG |
| | Her2/neu LH | | | TGCAGCCTCTGGATTCACCTTCAATAGCTACGCCATGAACTGGGTCCGCCAGGCTCCAGGAAAGG |
| | | | | GTTTGGAATGGGTTGCTCGCATAAGAAGTAAATATAATAATTATGCAACATATTATGCCGATTCA |
| | | | | GTGAAAGGCAGGTTCACCATCTCCAGAGATGATTCAAAAAACACTGCCTATCTACAAATGAACAA |
| | | | | CTTGAAAACTGAGGACACTGCCGTGTACTACTGTGTGAGACATGGGAACTTCGGTAATAGCTACG |
| | | | | TTTCCTGGTGGGCTTACTGGGGCCAAGGGACTCTGGTCACCGTCTCCTCAGGTGGTGGTGGTTCT |
| | | | | GGCGGCGGCGGCTCCGGTGGTGGTGGTTCTCAGACTGTTGTGACTCAGGAACCTTCACTCACCGT |
| | | | | ATCACCTGGTGGAACAGTCACACTCACTTGTGGCTCCTCGACTGGGGCTGTTACATCTGGCAACT |
| | | | | ACCCAAACTGGGTCCAACAAAAACCAGGTCAGGCACCCCGTGGTCTAATAGGTGGGACTAAGTTC |
| | | | | CTCGCCCCCGGTACTCCTGCCAGATTCTCAGGCTCCCTGCTTGGAGGCAAGGCTGCCCTCACCCT |
| | | | | CTCAGGGGTACAGCCAGAGGATGAGGCAGAATATTACTGTGTTCTATGGTACAGCAACCGCTGGG |
| | | | | TGTTCGGTGGAGGAACCAAACTGACTGTCCTATCCGGAGGTGGTGGATCCGACATCCAGATGACC |
| | | | | CAGTCCCCTAGCTCCCTGTCCGCCTCTGTGGGCGATAGGGTCACCATCACCTGCCGTGCCAGTCA |
| | | | | GGATGTGAATACTGCTGTAGCCTGGTATCAACAGAAACCAGGAAAAGCTCCGAAACTACTGATTT |
| | | | | ACTCGGCATCCTTCCTCTACTCTGGAGTCCCTTCTCGCTTCTCTGGATCCAGATCTGGGACGGAT |
| | | | | TTCACTCTGACCATCAGCAGTCTGCAGCCGGAAGACTTCGCAACTTATTACTGTCAGCAACATTA |
| | | | | TACTACTCCTCCCACGTTCGGACAGGGTACCAAGGTGGAGATCAAAGGTGGTGGTGGTTCTGGCG |
| | | | | GCGGCGGCTCCGGTGGTGGTGGTTCTGAGGTTCAGCTGGTGGAGTCTGGCGGTGGCCTGGTGCAG |
| | | | | CCAGGGGGCTCACTCCGTTTGTCCTGTGCAGCTTCTGGCTTCAACATTAAAGACACCTATATACA |
| | | | | CTGGGTGCGTCAGGCCCCGGGTAAGGGCCTGGAATGGGTTGCAAGGATTTATCCTACGAATGGTT |
| | | | | ATACTAGATATGCCGATAGCGTCAAGGGCCGTTTCACTATAAGCGCAGACACATCCAAAAACACA |
| | | | | GCCTACCTGCAGATGAACAGCCTGCGTGCTGAGGACACTGCCGTCTATTATTGTTCTAGGTGGGG |
| | | | | AGGGGACGGCTTCTATGCTATGGACTATTGGGGTCAAGGAACCCTGGTCACTGTCTCCTCC |
| 479 | I2C HL × | artificial | aa | EVQLVESGGGLVQPGGSLKLSCAASGFTFNKYAMNWVRQAPGKGLEWVARIRSKYNNYATYYADS |
| | Her2/neu LH | | | VKDRFTISRDDSKNTAYLQMNNLKTEDTAVYYCVRHGNFGNSYISYWAYWGQGTLVTVSSGGGGS |
| | | | | GGGGSGGGGSQTVVTQEPSLTVSPGGTVTLTCGSSTGAVTSGNYPNWVQQKPGQAPRGLIGGTKF |
| | | | | LAPGTPARFSGSLLGGKAALTLSGVQPEDEAEYYCVLWYSNRWVFGGGTKLTVLSGGGGSDIQMT |
| | | | | QSPSSLSASVGDRVTITCRASQDVNTAVAWYQQKPGKAPKLLIYSASFLYSGVPSRFSGSRSGTD |
| | | | | FTLTISSLQPEDFATYYCQQHYTTPPTFGQGTKVEIKGGGGSGGGGSGGGGSEVQLVESGGGLVQ |
| | | | | PGGSLRLSCAASGFNIKDTYIHWVRQAPGKGLEWVARIYPTNGYTRYADSVKGRFTISADTSKNT |
| | | | | AYLQMNSLRAEDTAVYYCSRWGGDGFYAMDYWGQGTLVTVSS |
| 480 | I2C HL × | artificial | nt | GAGGTGCAGCTGGTCGAGTCTGGAGGAGGATTGGTGCAGCCTGGAGGGTCATTGAAACTCTCATG |
| | Her2/neu LH | | | TGCAGCCTCTGGATTCACCTTCAATAAGTACGCCATGAACTGGGTCCGCCAGGCTCCAGGAAAGG |
| | | | | GTTTGGAATGGGTTGCTCGCATAAGAAGTAAATATAATAATTATGCAACATATTATGCCGATTCA |
| | | | | GTGAAAGACAGGTTCACCATCTCCAGAGATGATTCAAAAAACACTGCCTATCTACAAATGAACAA |
| | | | | CTTGAAAACTGAGGACACTGCCGTGTACTACTGTGTGAGACATGGGAACTTCGGTAATAGCTACA |
| | | | | TATCCTACTGGGCTTACTGGGGCCAAGGGACTCTGGTCACCGTCTCCTCAGGTGGTGGTGGTTCT |
| | | | | GGCGGCGGCGGCTCCGGTGGTGGTGGTTCTCAGACTGTTGTGACTCAGGAACCTTCACTCACCGT |
| | | | | ATCACCTGGTGGAACAGTCACACTCACTTGTGGCTCCTCGACTGGGGCTGTTACATCTGGCAACT |
| | | | | ACCCAAACTGGGTCCAACAAAAACCAGGTCAGGCACCCCGTGGTCTAATAGGTGGGACTAAGTTC |
| | | | | CTCGCCCCCGGTACTCCTGCCAGATTCTCAGGCTCCCTGCTTGGAGGCAAGGCTGCCCTCACCCT |
| | | | | CTCAGGGGTACAGCCAGAGGATGAGGCAGAATATTACTGTGTTCTATGGTACAGCAACCGCTGGG |
| | | | | TGTTCGGTGGAGGAACCAAACTGACTGTCCTATCCGGAGGTGGTGGATCCGACATCCAGATGACC |
| | | | | CAGTCCCCTAGCTCCCTGTCCGCCTCTGTGGGCGATAGGGTCACCATCACCTGCCGTGCCAGTCA |
| | | | | GGATGTGAATACTGCTGTAGCCTGGTATCAACAGAAACCAGGAAAAGCTCCGAAACTACTGATTT |
| | | | | ACTCGGCATCCTTCCTCTACTCTGGAGTCCCTTCTCGCTTCTCTGGATCCAGATCTGGGACGGAT |
| | | | | TTCACTCTGACCATCAGCAGTCTGCAGCCGGAAGACTTCGCAACTTATTACTGTCAGCAACATTA |
| | | | | TACTACTCCTCCCACGTTCGGACAGGGTACCAAGGTGGAGATCAAAGGTGGTGGTGGTTCTGGCG |
| | | | | GCGGCGGCTCCGGTGGTGGTGGTTCTGAGGTTCAGCTGGTGGAGTCTGGCGGTGGCCTGGTGCAG |
| | | | | CCAGGGGGCTCACTCCGTTTGTCCTGTGCAGCTTCTGGCTTCAACATTAAAGACACCTATATACA |
| | | | | CTGGGTGCGTCAGGCCCCGGGTAAGGGCCTGGAATGGGTTGCAAGGATTTATCCTACGAATGGTT |
| | | | | ATACTAGATATGCCGATAGCGTCAAGGGCCGTTTCACTATAAGCGCAGACACATCCAAAAACACA |
| | | | | GCCTACCTGCAGATGAACAGCCTGCGTGCTGAGGACACTGCCGTCTATTATTGTTCTAGGTGGGG |
| | | | | AGGGGACGGCTTCTATGCTATGGACTATTGGGGTCAAGGAACCCTGGTCACTGTCTCCTCC |
| 481 | HCDR1 of IgE | artificial | aa | SGYSWN |
| 482 | HCDR2 of IgE | artificial | aa | SITYDGSTNYADSVKG |
| 483 | HCDR3 of IgE | artificial | aa | GSHYFGHWHFAV |
| 484 | LCDR1 of IgE | artificial | aa | RASQSVDYDGDSYMN |
| 485 | LCDR2 of IgE | artificial | aa | AASYLES |
| 486 | LCDR3 of IgE | artificial | aa | QQSHEDPYT |
| 487 | VH of IgE | artificial | aa | EVQLVESGGGLVQPGGSLRLSCAVSGYSITSGYSWNWIRQAPGKGLEWVASITYDGSTNYADSVK |
| | | | | GRFTISRDDSKNTFYLQMNSLRAEDTAVYYCARGSHYFGHWHFAVWGQGTLVTVSS |
| 488 | VH of IgE | artificial | nt | GAGGTGCAGCTGGTGGAGTCTGGGGGAGGCTTGGTCCAGCCTGGGGGGTCCCTGAGACTCTCCTG |
| | | | | TGCAGTCTCTGGATACTCCATCACCAGCGGCTACAGTTGGAACTGGATCCGCCAGGCTCCAGGGA |
| | | | | AGGGGCTGGAGTGGGTCGCAAGTATTACGTACGACGGTAGCACAAACTACGCAGACTCCGTGAAG |
| | | | | GGCAGATTCACCATCTCCAGAGACGACTCCAAGAACACGTTCTATCTTCAAATGAACAGCCTGAG |
| | | | | AGCCGAGGACACGGCTGTGTATTACTGTGCGAGAGGTTCCCATTATTTCGGCCATTGGCACTTCG |
| | | | | CCGTGTGGGGCCAGGGAACGCTTGTCACAGTTAGCTCC |
| 489 | VL of IgE | artificial | aa | DIQLTQSPSSLSASVGDRVTITCRASQSVDYDGDSYMNWYQQKPGKAPKLLIYAASYLESGVPSR |
| | | | | FSGSGSGTDFTLTISSLQPEDFATYYCQQSHEDPYTFGQGTKVEIK |
| 490 | VL of IgE | artificial | nt | GACATCCAGCTGACCCAGTCTCCATCCTCCCTGTCTGCATCTGTTGGAGACAGAGTCACCATCAC |
| | | | | TTGCCGGGCAAGTCAGAGCGTTGACTATGATGGGGACAGCTATATGAATTGGTATCAGCAGAAAC |
| | | | | CAGGGAAAGCCCCTAAGCTCCTGATCTATGCTGCATCCTACTTGGAAAGTGGGGTCCCATCAAGG |
| | | | | TTCAGTGGCAGTGGATCTGGGACAGATTTCACTCTCACCATCAGCAGTCTGCAACCTGAAGATTT |
| | | | | TGCAACTTACTACTGTCAACAGTCTCATGAAGATCCATATACCTTTGGACAGGGCACTAAAGTCG |
| | | | | AAATAAAG |
| 491 | HL of IgE | artificial | aa | EVQLVESGGGLVQPGGSLRLSCAVSGYSITSGYSWNWIRQAPGKGLEWVASITYDGSTNYADSVK |
| | | | | GRFTISRDDSKNTFYLQMNSLRAEDTAVYYCARGSHYFGHWHFAVWGQGTLVTVSSggggsggg |
| | | | | gsggggsDIQLTQSPSSLSASVGDRVTITCRASQSVDYDGDSYMNWYQQKPGKAPKLLIYAASY |
| | | | | LESGVPSRFSGSGSGTDFTLTISSLQPEDFATYYCQQSHEDPYTFGQGTKVEIK |
| 492 | HL of IgE | artificial | nt | GAGGTGCAGCTGGTGGAGTCTGGGGGAGGCTTGGTCCAGCCTGGGGGGTCCCTGAGACTCTCCTG |
| | | | | TGCAGTCTCTGGATACTCCATCACCAGCGGCTACAGTTGGAACTGGATCCGCCAGGCTCCAGGGA |
| | | | | AGGGGCTGGAGTGGGTCGCAAGTATTACGTACGACGGTAGCACAAACTACGCAGACTCCGTGAAG |
| | | | | GGCAGATTCACCATCTCCAGAGACGACTCCAAGAACACGTTCTATCTTCAAATGAACAGCCTGAG |
| | | | | AGCCGAGGACACGGCTGTGTATTACTGTGCGAGAGGTTCCCATTATTTCGGCCATTGGCACTTCG |
| | | | | CCGTGTGGGGCCAGGGAACGCTTGTCACAGTTAGCTCCGGTGGTGGTGGTTCTGGCGGCGGCGGC |
| | | | | TCCGGTGGTGGTGGTTCTGACATCCAGCTGACCCAGTCTCCATCCTCCCTGTCTGCATCTGTTGG |
| | | | | AGACAGAGTCACCATCACTTGCCGGGCAAGTCAGAGCGTTGACTATGATGGGGACAGCTATATGA |
| | | | | ATTGGTATCAGCAGAAACCAGGGAAAGCCCCTAAGCTCCTGATCTATGCTGCATCCTACTTGGAA |
| | | | | AGTGGGGTCCCATCAAGGTTCAGTGGCAGTGGATCTGGGACAGATTTCACTCTCACCATCAGCAG |
| | | | | TCTGCAACCTGAAGATTTTGCAACTTACTACTGTCAACAGTCTCATGAAGATCCATATACCTTTG |
| | | | | GACAGGGCACTAAAGTCGAAATAAAG |
| 493 | LH of IgE | artificial | aa | DIQLTQSPSSLSASVGDRVTITCRASQSVDYDGDSYMNWYQQKPGKAPKLLIYAASYLESGVPSR |
| | | | | FSGSGSGTDFTLTISSLQPEDFATYYCQQSHEDPYTFGQGTKVEIKggggsggggsggggsEV |
| | | | | QLVESGGGLVQPGGSLRLSCAVSGYSITSGYSWNWIRQAPGKGLEWVASITYDGSTNYADSVKGR |
| | | | | FTISRDDSKNTFYLQMNSLRAEDTAVYYCARGSHYFGHWHFAVWGQGTLVTVSS |
| 494 | LH of IgE | artificial | nt | GACATCCAGCTGACCCAGTCTCCATCCTCCCTGTCTGCATCTGTTGGAGACAGAGTCACCATCAC |
| | | | | TTGCCGGGCAAGTCAGAGCGTTGACTATGATGGGGACAGCTATATGAATTGGTATCAGCAGAAAC |
| | | | | CAGGGAAAGCCCCTAAGCTCCTGATCTATGCTGCATCCTACTTGGAAAGTGGGGTCCCATCAAGG |
| | | | | TTCAGTGGCAGTGGATCTGGGACAGATTTCACTCTCACCATCAGCAGTCTGCAACCTGAAGATTT |
| | | | | TGCAACTTACTACTGTCAACAGTCTCATGAAGATCCATATACCTTTGGACAGGGCACTAAAGTCG |
| | | | | AAATAAAGGGTGGTGGTGGTTCTGGCGGCGGCGGCTCCGGTGGTGGTGGTTCTGAGGTGCAGCTG |
| | | | | GTGGAGTCTGGGGGAGGCTTGGTCCAGCCTGGGGGGTCCCTGAGACTCTCCTGTGCAGTCTCTGG |
| | | | | ATACTCCATCACCAGCGGCTACAGTTGGAACTGGATCCGCCAGGCTCCAGGGAAGGGGCTGGAGT |
| | | | | GGGTCGCAAGTATTACGTACGACGGTAGCACAAACTACGCAGACTCCGTGAAGGGCAGATTCACC |
| | | | | ATCTCCAGAGACGACTCCAAGAACACGTTCTATCTTCAAATGAACAGCCTGAGAGCCGAGGACAC |
| | | | | GGCTGTGTATTACTGTGCGAGAGGTTCCCATTATTTCGGCCATTGGCACTTCGCCGTGTGGGGCC |
| | | | | AGGGAACGCTTGTCACAGTTAGCTCC |
| 495 | IgE HL × H2C HL | artificial | aa | EVQLVESGGGLVQPGGSLRLSCAVSGYSITSGYSWNWIRQAPGKGLEWVASITYDGSTNYADSVK |
| | | | | GRFTISRDDSKNTFYLQMNSLRAEDTAVYYCARGSHYFGHWHFAVWGQGTLVTVSSggggsggg |
| | | | | gsggggsDIQLTQSPSSLSASVGDRVTITCRASQSVDYDGDSYMNWYQQKPGKAPKLLIYAASY |
| | | | | LESGVPSRFSGSGSGTDFTLTISSLQPEDFATYYCQQSHEDPYTFGQGTKVEIKSGGGGSEVQLV |
| | | | | ESGGGLVQPGGSLKLSCAASGFTFNKYAMNWVRQAPGKGLEWVARIRSKYNNYATYYADSVKDRF |
| | | | | TISRDDSKNTAYLQMNNLKTEDTAVYYCVRHGNFGNSYISYWAYWGQGTLVTVSSGGGGSGGGGS |
| | | | | GGGGSQTVVTQEPSLTVSPGGTVTLTCGSSTGAVTSGYYPNWVQQKPGQAPRGLIGGTKFLAPGT |
| | | | | PARFSGSLLGGKAALTLSGVQPEDEAEYYCALWYSNRWVFGGGTKLTVL |
| 496 | IgE HL × H2C HL | artificial | nt | GAGGTGCAGCTGGTGGAGTCTGGGGGAGGCTTGGTCCAGCCTGGGGGGTCCCTGAGACTCTCCTG |
| | | | | TGCAGTCTCTGGATACTCCATCACCAGCGGCTACAGTTGGAACTGGATCCGCCAGGCTCCAGGGA |
| | | | | AGGGGCTGGAGTGGGTCGCAAGTATTACGTACGACGGTAGCACAAACTACGCAGACTCCGTGAAG |
| | | | | GGCAGATTCACCATCTCCAGAGACGACTCCAAGAACACGTTCTATCTTCAAATGAACAGCCTGAG |
| | | | | AGCCGAGGACACGGCTGTGTATTACTGTGCGAGAGGTTCCCATTATTTCGGCCATTGGCACTTCG |
| | | | | CCGTGTGGGGCCAGGGAACGCTTGTCACAGTTAGCTCCGGTGGTGGTGGTTCTGGCGGCGGCGGC |
| | | | | TCCGGTGGTGGTGGTTCTGACATCCAGCTGACCCAGTCTCCATCCTCCCTGTCTGCATCTGTTGG |
| | | | | AGACAGAGTCACCATCACTTGCCGGGCAAGTCAGAGCGTTGACTATGATGGGGACAGCTATATGA |
| | | | | ATTGGTATCAGCAGAAACCAGGGAAAGCCCCTAAGCTCCTGATCTATGCTGCATCCTACTTGGAA |
| | | | | AGTGGGGTCCCATCAAGGTTCAGTGGCAGTGGATCTGGGACAGATTTCACTCTCACCATCAGCAG |
| | | | | TCTGCAACCTGAAGATTTTGCAACTTACTACTGTCAACAGTCTCATGAAGATCCATATACCTTTG |
| | | | | GACAGGGCACTAAAGTCGAAATAAAGTCCGGAGGTGGTGGATCCGAGGTGCAGCTGGTCGAGTCT |
| | | | | GGAGGAGGATTGGTGCAGCCTGGAGGGTCATTGAAACTCTCATGTGCAGCCTCTGGATTCACCTT |
| | | | | CAATAAGTACGCCATGAACTGGGTCCGCCAGGCTCCAGGAAAGGGTTTGGAATGGGTTGCTCGCA |
| | | | | TAAGAAGTAAATATAATAATTATGCAACATATTATGCCGATTCAGTGAAAGACAGGTTCACCATC |
| | | | | TCCAGAGATGATTCAAAAAACACTGCCTATCTACAAATGAACAACTTGAAAACTGAGGACACTGC |
| | | | | CGTGTACTACTGTGTGAGACATGGGAACTTCGGTAATAGCTACATATCCTACTGGGCTTACTGGG |
| | | | | GCCAAGGGACTCTGGTCACCGTCTCCTCAGGTGGTGGTGGTTCTGGCGGCGGCGGCTCCGGTGGT |
| | | | | GGTGGTTCTCAGACTGTTGTGACTCAGGAACCTTCACTCACCGTATCACCTGGTGGAACAGTCAC |
| | | | | ACTCACTTGTGGCTCCTCGACTGGGGCTGTTACATCTGGCTACTACCCAAACTGGGTCCAACAAA |
| | | | | AACCAGGTCAGGCACCCCGTGGTCTAATAGGTGGGACTAAGTTCCTCGCCCCCGGTACTCCTGCC |
| | | | | AGATTCTCAGGCTCCCTGCTTGGAGGCAAGGCTGCCCTCACCCTCTCAGGGGTACAGCCAGAGGA |
| | | | | TGAGGCAGAATATTACTGTGCTCTATGGTACAGCAACCGCTGGGTGTTCGGTGGAGGAACCAAAC |
| | | | | TGACTGTCCTA |
| 497 | IgE HL × F12Q | artificial | aa | EVQLVESGGGLVQPGGSLRLSCAVSGYSITSGYSWNWIRQAPGKGLEWVASITYDGSTNYADSVK |
| | HL | | | GRFTISRDDSKNTFYLQMNSLRAEDTAVYYCARGSHYFGHWHFAVWGQGTLVTVSSggggsggg |
| | | | | gsggggsDIQLTQSPSSLSASVGDRVTITCRASQSVDYDGDSYMNWYQQKPGKAPKLLIYAASY |
| | | | | LESGVPSRFSGSGSGTDFTLTISSLQPEDFATYYCQQSHEDPYTFGQGTKVEIKSGGGGSEVQLV |
| | | | | ESGGGLVQPGGSLKLSCAASGFTFNSYAMNWVRQAPGKGLEWVARIRSKYNNYATYYADSVKGRF |
| | | | | TISRDDSKNTAYLQMNNLKTEDTAVYYCVRHGNFGNSYVSWWAYWGQGTLVTVSSGGGGSGGGGS |
| | | | | GGGGSQTVVTQEPSLTVSPGGTVTLTCGSSTGAVTSGNYPNWVQQKPGQAPRGLIGGTKFLAPGT |
| | | | | PARFSGSLLGGKAALTLSGVQPEDEAEYYCVLWYSNRWVFGGGTKLTVL |
| 498 | IgE HL × F12Q | artificial | nt | GAGGTGCAGCTGGTGGAGTCTGGGGGAGGCTTGGTCCAGCCTGGGGGGTCCCTGAGACTCTCCTG |
| | HL | | | TGCAGTCTCTGGATACTCCATCACCAGCGGCTACAGTTGGAACTGGATCCGCCAGGCTCCAGGGA |
| | | | | AGGGGCTGGAGTGGGTCGCAAGTATTACGTACGACGGTAGCACAAACTACGCAGACTCCGTGAAG |
| | | | | GGCAGATTCACCATCTCCAGAGACGACTCCAAGAACACGTTCTATCTTCAAATGAACAGCCTGAG |
| | | | | AGCCGAGGACACGGCTGTGTATTACTGTGCGAGAGGTTCCCATTATTTCGGCCATTGGCACTTCG |
| | | | | CCGTGTGGGGCCAGGGAACGCTTGTCACAGTTAGCTCCGGTGGTGGTGGTTCTGGCGGCGGCGGC |
| | | | | TCCGGTGGTGGTGGTTCTGACATCCAGCTGACCCAGTCTCCATCCTCCCTGTCTGCATCTGTTGG |
| | | | | AGACAGAGTCACCATCACTTGCCGGGCAAGTCAGAGCGTTGACTATGATGGGGACAGCTATATGA |
| | | | | ATTGGTATCAGCAGAAACCAGGGAAAGCCCCTAAGCTCCTGATCTATGCTGCATCCTACTTGGAA |
| | | | | AGTGGGGTCCCATCAAGGTTCAGTGGCAGTGGATCTGGGACAGATTTCACTCTCACCATCAGCAG |
| | | | | TCTGCAACCTGAAGATTTTGCAACTTACTACTGTCAACAGTCTCATGAAGATCCATATACCTTTG |
| | | | | GACAGGGCACTAAAGTCGAAATAAAGTCCGGAGGTGGTGGATCCGAGGTGCAGCTGGTCGAGTCT |
| | | | | GGAGGAGGATTGGTGCAGCCTGGAGGGTCATTGAAACTCTCATGTGCAGCCTCTGGATTCACCTT |
| | | | | CAATAGCTACGCCATGAACTGGGTCCGCCAGGCTCCAGGAAAGGGTTTGGAATGGGTTGCTCGCA |
| | | | | TAAGAAGTAAATATAATAATTATGCAACATATTATGCCGATTCAGTGAAAGGCAGGTTCACCATC |
| | | | | TCCAGAGATGATTCAAAAAACACTGCCTATCTACAAATGAACAACTTGAAAACTGAGGACACTGC |
| | | | | CGTGTACTACTGTGTGAGACATGGGAACTTCGGTAATAGCTACGTTTCCTGGTGGGCTTACTGGG |
| | | | | GCCAAGGGACTCTGGTCACCGTCTCCTCAGGTGGTGGTGGTTCTGGCGGCGGCGGCTCCGGTGGT |
| | | | | GGTGGTTCTCAGACTGTTGTGACTCAGGAACCTTCACTCACCGTATCACCTGGTGGAACAGTCAC |
| | | | | ACTCACTTGTGGCTCCTCGACTGGGGCTGTTACATCTGGCAACTACCCAAACTGGGTCCAACAAA |
| | | | | AACCAGGTCAGGCACCCCGTGGTCTAATAGGTGGGACTAAGTTCCTCGCCCCCGGTACTCCTGCC |
| | | | | AGATTCTCAGGCTCCCTGCTTGGAGGCAAGGCTGCCCTCACCCTCTCAGGGGTACAGCCAGAGGA |
| | | | | TGAGGCAGAATATTACTGTGTTCTATGGTACAGCAACCGCTGGGTGTTCGGTGGAGGAACCAAAC |
| | | | | TGACTGTCCTA |
| 499 | IgE HL × I2C HL | artificial | aa | EVQLVESGGGLVQPGGSLRLSCAVSGYSITSGYSWNWIRQAPGKGLEWVASITYDGSTNYADSVK |
| | | | | GRFTISRDDSKNTFYLQMNSLRAEDTAVYYCARGSHYFGHWHFAVWGQGTLVTVSSggggsggg |
| | | | | gsggggsDIQLTQSPSSLSASVGDRVTITCRASQSVDYDGDSYMNWYQQKPGKAPKLLIYAASY |
| | | | | LESGVPSRFSGSGSGTDFTLTISSLQPEDFATYYCQQSHEDPYTFGQGTKVEIKSGGGGSEVQLV |
| | | | | ESGGGLVQPGGSLKLSCAASGFTFNKYAMNWVRQAPGKGLEWVARIRSKYNNYATYYADSVKDRF |
| | | | | TISRDDSKNTAYLQMNNLKTEDTAVYYCVRHGNFGNSYISYWAYWGQGTLVTVSSGGGGSGGGGS |
| | | | | GGGGSQTVVTQEPSLTVSPGGTVTLTCGSSTGAVTSGNYPNWVQQKPGQAPRGLIGGTKFLAPGT |
| | | | | PARFSGSLLGGKAALTLSGVQPEDEAEYYCVLWYSNRWVFGGGTKLTVL |
| 500 | IgE HL × I2C HL | artificial | nt | GAGGTGCAGCTGGTGGAGTCTGGGGGAGGCTTGGTCCAGCCTGGGGGGTCCCTGAGACTCTCCTG |
| | | | | TGCAGTCTCTGGATACTCCATCACCAGCGGCTACAGTTGGAACTGGATCCGCCAGGCTCCAGGGA |
| | | | | AGGGGCTGGAGTGGGTCGCAAGTATTACGTACGACGGTAGCACAAACTACGCAGACTCCGTGAAG |
| | | | | GGCAGATTCACCATCTCCAGAGACGACTCCAAGAACACGTTCTATCTTCAAATGAACAGCCTGAG |
| | | | | AGCCGAGGACACGGCTGTGTATTACTGTGCGAGAGGTTCCCATTATTTCGGCCATTGGCACTTCG |
| | | | | CCGTGTGGGGCCAGGGAACGCTTGTCACAGTTAGCTCCGGTGGTGGTGGTTCTGGCGGCGGCGGC |
| | | | | TCCGGTGGTGGTGGTTCTGACATCCAGCTGACCCAGTCTCCATCCTCCCTGTCTGCATCTGTTGG |
| | | | | AGACAGAGTCACCATCACTTGCCGGGCAAGTCAGAGCGTTGACTATGATGGGGACAGCTATATGA |
| | | | | ATTGGTATCAGCAGAAACCAGGGAAAGCCCCTAAGCTCCTGATCTATGCTGCATCCTACTTGGAA |
| | | | | AGTGGGGTCCCATCAAGGTTCAGTGGCAGTGGATCTGGGACAGATTTCACTCTCACCATCAGCAG |
| | | | | TCTGCAACCTGAAGATTTTGCAACTTACTACTGTCAACAGTCTCATGAAGATCCATATACCTTTG |
| | | | | GACAGGGCACTAAAGTCGAAATAAAGTCCGGAGGTGGTGGATCCGAGGTGCAGCTGGTCGAGTCT |
| | | | | GGAGGAGGATTGGTGCAGCCTGGAGGGTCATTGAAACTCTCATGTGCAGCCTCTGGATTCACCTT |
| | | | | CAATAAGTACGCCATGAACTGGGTCCGCCAGGCTCCAGGAAAGGGTTTGGAATGGGTTGCTCGCA |
| | | | | TAAGAAGTAAATATAATAATTATGCAACATATTATGCCGATTCAGTGAAAGACAGGTTCACCATC |
| | | | | TCCAGAGATGATTCAAAAAACACTGCCTATCTACAAATGAACAACTTGAAAACTGAGGACACTGC |
| | | | | CGTGTACTACTGTGTGAGACATGGGAACTTCGGTAATAGCTACATATCCTACTGGGCTTACTGGG |
| | | | | GCCAAGGGACTCTGGTCACCGTCTCCTCAGGTGGTGGTGGTTCTGGCGGCGGCGGCTCCGGTGGT |
| | | | | GGTGGTTCTCAGACTGTTGTGACTCAGGAACCTTCACTCACCGTATCACCTGGTGGAACAGTCAC |
| | | | | ACTCACTTGTGGCTCCTCGACTGGGGCTGTTACATCTGGCAACTACCCAAACTGGGTCCAACAAA |
| | | | | AACCAGGTCAGGCACCCCGTGGTCTAATAGGTGGGACTAAGTTCCTCGCCCCCGGTACTCCTGCC |
| | | | | AGATTCTCAGGCTCCCTGCTTGGAGGCAAGGCTGCCCTCACCCTCTCAGGGGTACAGCCAGAGGA |
| | | | | TGAGGCAGAATATTACTGTGTTCTATGGTACAGCAACCGCTGGGTGTTCGGTGGAGGAACCAAAC |
| | | | | TGACTGTCCTA |
| 501 | IgE LH × H2C HL | artificial | aa | DIQLTQSPSSLSASVGDRVTITCRASQSVDYDGDSYMNWYQQKPGKAPKLLIYAASYLESGVPSR |
| | | | | FSGSGSGTDFTLTISSLQPEDFATYYCQQSHEDPYTFGQGTKVEIKggggsggggsggggsEV |
| | | | | QLVESGGGLVQPGGSLRLSCAVSGYSITSGYSWNWIRQAPGKGLEWVASITYDGSTNYADSVKGR |
| | | | | FTISRDDSKNTFYLQMNSLRAEDTAVYYCARGSHYFGHWHFAVWGQGTLVTVSSGGGGSEVQLVE |
| | | | | SGGGLVQPGGSLKLSCAASGFTFNKYAMNWVRQAPGKGLEWVARIRSKYNNYATYYADSVKDRFT |
| | | | | ISRDDSKNTAYLQMNNLKTEDTAVYYCVRHGNFGNSYISYWAYWGQGTLVTVSSGGGGSGGGGSG |
| | | | | GGGSQTVVTQEPSLTVSPGGTVTLTCGSSTGAVTSGYYPNWVQQKPGQAPRGLIGGTKFLAPGTP |
| | | | | ARFSGSLLGGKAALTLSGVQPEDEAEYYCALWYSNRWVFGGGTKLTVL |
| 502 | IgE LH × H2C HL | artificial | nt | GACATCCAGCTGACCCAGTCTCCATCCTCCCTGTCTGCATCTGTTGGAGACAGAGTCACCATCAC |
| | | | | TTGCCGGGCAAGTCAGAGCGTTGACTATGATGGGGACAGCTATATGAATTGGTATCAGCAGAAAC |
| | | | | CAGGGAAAGCCCCTAAGCTCCTGATCTATGCTGCATCCTACTTGGAAAGTGGGGTCCCATCAAGG |
| | | | | TTCAGTGGCAGTGGATCTGGGACAGATTTCACTCTCACCATCAGCAGTCTGCAACCTGAAGATTT |
| | | | | TGCAACTTACTACTGTCAACAGTCTCATGAAGATCCATATACCTTTGGACAGGGCACTAAAGTCG |
| | | | | AAATAAAGGGTGGTGGTGGTTCTGGCGGCGGCGGCTCCGGTGGTGGTGGTTCTGAGGTGCAGCTG |
| | | | | GTGGAGTCTGGGGGAGGCTTGGTCCAGCCTGGGGGGTCCCTGAGACTCTCCTGTGCAGTCTCTGG |
| | | | | ATACTCCATCACCAGCGGCTACAGTTGGAACTGGATCCGCCAGGCTCCAGGGAAGGGGCTGGAGT |
| | | | | GGGTCGCAAGTATTACGTACGACGGTAGCACAAACTACGCAGACTCCGTGAAGGGCAGATTCACC |
| | | | | ATCTCCAGAGACGACTCCAAGAACACGTTCTATCTTCAAATGAACAGCCTGAGAGCCGAGGACAC |
| | | | | GGCTGTGTATTACTGTGCGAGAGGTTCCCATTATTTCGGCCATTGGCACTTCGCCGTGTGGGGCC |
| | | | | AGGGAACGCTTGTCACAGTTAGCTCCGGAGGTGGTGGATCCGAGGTGCAGCTGGTCGAGTCTGGA |
| | | | | GGAGGATTGGTGCAGCCTGGAGGGTCATTGAAACTCTCATGTGCAGCCTCTGGATTCACCTTCAA |
| | | | | TAAGTACGCCATGAACTGGGTCCGCCAGGCTCCAGGAAAGGGTTTGGAATGGGTTGCTCGCATAA |
| | | | | GAAGTAAATATAATAATTATGCAACATATTATGCCGATTCAGTGAAAGACAGGTTCACCATCTCC |
| | | | | AGAGATGATTCAAAAAACACTGCCTATCTACAAATGAACAACTTGAAAACTGAGGACACTGCCGT |
| | | | | GTACTACTGTGTGAGACATGGGAACTTCGGTAATAGCTACATATCCTACTGGGCTTACTGGGGCC |
| | | | | AAGGGACTCTGGTCACCGTCTCCTCAGGTGGTGGTGGTTCTGGCGGCGGCGGCTCCGGTGGTGGT |
| | | | | GGTTCTCAGACTGTTGTGACTCAGGAACCTTCACTCACCGTATCACCTGGTGGAACAGTCACACT |
| | | | | CACTTGTGGCTCCTCGACTGGGGCTGTTACATCTGGCTACTACCCAAACTGGGTCCAACAAAAAC |
| | | | | CAGGTCAGGCACCCCGTGGTCTAATAGGTGGGACTAAGTTCCTCGCCCCCGGTACTCCTGCCAGA |
| | | | | TTCTCAGGCTCCCTGCTTGGAGGCAAGGCTGCCCTCACCCTCTCAGGGGTACAGCCAGAGGATGA |
| | | | | GGCAGAATATTACTGTGCTCTATGGTACAGCAACCGCTGGGTGTTCGGTGGAGGAACCAAACTGA |
| | | | | CTGTCCTA |
| 503 | IgE LH × F12Q | artificial | aa | DIQLTQSPSSLSASVGDRVTITCRASQSVDYDGDSYMNWYQQKPGKAPKLLIYAASYLESGVPSR |
| | HL | | | FSGSGSGTDFTLTISSLQPEDFATYYCQQSHEDPYTFGQGTKVEIKggggsggggsggggsEV |
| | | | | QLVESGGGLVQPGGSLRLSCAVSGYSITSGYSWNWIRQAPGKGLEWVASITYDGSTNYADSVKGR |
| | | | | FTISRDDSKNTFYLQMNSLRAEDTAVYYCARGSHYFGHWHFAVWGQGTLVTVSSGGGGSEVQLVE |
| | | | | SGGGLVQPGGSLKLSCAASGFTFNSYAMNWVRQAPGKGLEWVARIRSKYNNYATYYADSVKGRFT |
| | | | | ISRDDSKNTAYLQMNNLKTEDTAVYYCVRHGNFGNSYVSWWAYWGQGTLVTVSSGGGGSGGGGSG |
| | | | | GGGSQTVVTQEPSLTVSPGGTVTLTCGSSTGAVTSGNYPNWVQQKPGQAPRGLIGGTKFLAPGTP |
| | | | | ARFSGSLLGGKAALTLSGVQPEDEAEYYCVLWYSNRWVFGGGTKLTVL |
| 504 | IgE LH × F12Q | artificial | nt | GACATCCAGCTGACCCAGTCTCCATCCTCCCTGTCTGCATCTGTTGGAGACAGAGTCACCATCAC |
| | HL | | | TTGCCGGGCAAGTCAGAGCGTTGACTATGATGGGGACAGCTATATGAATTGGTATCAGCAGAAAC |
| | | | | CAGGGAAAGCCCCTAAGCTCCTGATCTATGCTGCATCCTACTTGGAAAGTGGGGTCCCATCAAGG |
| | | | | TTCAGTGGCAGTGGATCTGGGACAGATTTCACTCTCACCATCAGCAGTCTGCAACCTGAAGATTT |
| | | | | TGCAACTTACTACTGTCAACAGTCTCATGAAGATCCATATACCTTTGGACAGGGCACTAAAGTCG |
| | | | | AAATAAAGGGTGGTGGTGGTTCTGGCGGCGGCGGCTCCGGTGGTGGTGGTTCTGAGGTGCAGCTG |
| | | | | GTGGAGTCTGGGGGAGGCTTGGTCCAGCCTGGGGGGTCCCTGAGACTCTCCTGTGCAGTCTCTGG |
| | | | | ATACTCCATCACCAGCGGCTACAGTTGGAACTGGATCCGCCAGGCTCCAGGGAAGGGGCTGGAGT |
| | | | | GGGTCGCAAGTATTACGTACGACGGTAGCACAAACTACGCAGACTCCGTGAAGGGCAGATTCACC |
| | | | | ATCTCCAGAGACGACTCCAAGAACACGTTCTATCTTCAAATGAACAGCCTGAGAGCCGAGGACAC |
| | | | | GGCTGTGTATTACTGTGCGAGAGGTTCCCATTATTTCGGCCATTGGCACTTCGCCGTGTGGGGCC |
| | | | | AGGGAACGCTTGTCACAGTTAGCTCCGGAGGTGGTGGATCCGAGGTGCAGCTGGTCGAGTCTGGA |
| | | | | GGAGGATTGGTGCAGCCTGGAGGGTCATTGAAACTCTCATGTGCAGCCTCTGGATTCACCTTCAA |
| | | | | TAGCTACGCCATGAACTGGGTCCGCCAGGCTCCAGGAAAGGGTTTGGAATGGGTTGCTCGCATAA |
| | | | | GAAGTAAATATAATAATTATGCAACATATTATGCCGATTCAGTGAAAGGCAGGTTCACCATCTCC |
| | | | | AGAGATGATTCAAAAAACACTGCCTATCTACAAATGAACAACTTGAAAACTGAGGACACTGCCGT |
| | | | | GTACTACTGTGTGAGACATGGGAACTTCGGTAATAGCTACGTTTCCTGGTGGGCTTACTGGGGCC |
| | | | | AAGGGACTCTGGTCACCGTCTCCTCAGGTGGTGGTGGTTCTGGCGGCGGCGGCTCCGGTGGTGGT |
| | | | | GGTTCTCAGACTGTTGTGACTCAGGAACCTTCACTCACCGTATCACCTGGTGGAACAGTCACACT |
| | | | | CACTTGTGGCTCCTCGACTGGGGCTGTTACATCTGGCAACTACCCAAACTGGGTCCAACAAAAAC |
| | | | | CAGGTCAGGCACCCCGTGGTCTAATAGGTGGGACTAAGTTCCTCGCCCCCGGTACTCCTGCCAGA |
| | | | | TTCTCAGGCTCCCTGCTTGGAGGCAAGGCTGCCCTCACCCTCTCAGGGGTACAGCCAGAGGATGA |
| | | | | GGCAGAATATTACTGTGTTCTATGGTACAGCAACCGCTGGGTGTTCGGTGGAGGAACCAAACTGA |
| | | | | CTGTCCTA |
| 505 | IgE LH × I2C HL | artificial | aa | DIQLTQSPSSLSASVGDRVTITCRASQSVDYDGDSYMNWYQQKPGKAPKLLIYAASYLESGVPSR |
| | | | | FSGSGSGTDFTLTISSLQPEDFATYYCQQSHEDPYTFGQGTKVEIKggggsggggsggggsEV |
| | | | | QLVESGGGLVQPGGSLRLSCAVSGYSITSGYSWNWIRQAPGKGLEWVASITYDGSTNYADSVKGR |
| | | | | FTISRDDSKNTFYLQMNSLRAEDTAVYYCARGSHYFGHWHFAVWGQGTLVTVSSGGGGSEVQLVE |
| | | | | SGGGLVQPGGSLKLSCAASGFTFNKYAMNWVRQAPGKGLEWVARIRSKYNNYATYYADSVKDRFT |
| | | | | ISRDDSKNTAYLQMNNLKTEDTAVYYCVRHGNFGNSYISYWAYWGQGTLVTVSSGGGGSGGGGSG |
| | | | | GGGSQTVVTQEPSLTVSPGGTVTLTCGSSTGAVTSGNYPNWVQQKPGQAPRGLIGGTKFLAPGTP |
| | | | | ARFSGSLLGGKAALTLSGVQPEDEAEYYCVLWYSNRWVFGGGTKLTVL |
| 506 | IgE LH × I2C HL | artificial | nt | GACATCCAGCTGACCCAGTCTCCATCCTCCCTGTCTGCATCTGTTGGAGACAGAGTCACCATCAC |
| | | | | TTGCCGGGCAAGTCAGAGCGTTGACTATGATGGGGACAGCTATATGAATTGGTATCAGCAGAAAC |
| | | | | CAGGGAAAGCCCCTAAGCTCCTGATCTATGCTGCATCCTACTTGGAAAGTGGGGTCCCATCAAGG |
| | | | | TTCAGTGGCAGTGGATCTGGGACAGATTTCACTCTCACCATCAGCAGTCTGCAACCTGAAGATTT |
| | | | | TGCAACTTACTACTGTCAACAGTCTCATGAAGATCCATATACCTTTGGACAGGGCACTAAAGTCG |
| | | | | AAATAAAGGGTGGTGGTGGTTCTGGCGGCGGCGGCTCCGGTGGTGGTGGTTCTGAGGTGCAGCTG |
| | | | | GTGGAGTCTGGGGGAGGCTTGGTCCAGCCTGGGGGGTCCCTGAGACTCTCCTGTGCAGTCTCTGG |
| | | | | ATACTCCATCACCAGCGGCTACAGTTGGAACTGGATCCGCCAGGCTCCAGGGAAGGGGCTGGAGT |
| | | | | GGGTCGCAAGTATTACGTACGACGGTAGCACAAACTACGCAGACTCCGTGAAGGGCAGATTCACC |
| | | | | ATCTCCAGAGACGACTCCAAGAACACGTTCTATCTTCAAATGAACAGCCTGAGAGCCGAGGACAC |
| | | | | GGCTGTGTATTACTGTGCGAGAGGTTCCCATTATTTCGGCCATTGGCACTTCGCCGTGTGGGGCC |
| | | | | AGGGAACGCTTGTCACAGTTAGCTCCGGAGGTGGTGGATCCGAGGTGCAGCTGGTCGAGTCTGGA |
| | | | | GGAGGATTGGTGCAGCCTGGAGGGTCATTGAAACTCTCATGTGCAGCCTCTGGATTCACCTTCAA |
| | | | | TAAGTACGCCATGAACTGGGTCCGCCAGGCTCCAGGAAAGGGTTTGGAATGGGTTGCTCGCATAA |
| | | | | GAAGTAAATATAATAATTATGCAACATATTATGCCGATTCAGTGAAAGACAGGTTCACCATCTCC |
| | | | | AGAGATGATTCAAAAAACACTGCCTATCTACAAATGAACAACTTGAAAACTGAGGACACTGCCGT |
| | | | | GTACTACTGTGTGAGACATGGGAACTTCGGTAATAGCTACATATCCTACTGGGCTTACTGGGGCC |
| | | | | AAGGGACTCTGGTCACCGTCTCCTCAGGTGGTGGTGGTTCTGGCGGCGGCGGCTCCGGTGGTGGT |
| | | | | GGTTCTCAGACTGTTGTGACTCAGGAACCTTCACTCACCGTATCACCTGGTGGAACAGTCACACT |
| | | | | CACTTGTGGCTCCTCGACTGGGGCTGTTACATCTGGCAACTACCCAAACTGGGTCCAACAAAAAC |
| | | | | CAGGTCAGGCACCCCGTGGTCTAATAGGTGGGACTAAGTTCCTCGCCCCCGGTACTCCTGCCAGA |
| | | | | TTCTCAGGCTCCCTGCTTGGAGGCAAGGCTGCCCTCACCCTCTCAGGGGTACAGCCAGAGGATGA |
| | | | | GGCAGAATATTACTGTGTTCTATGGTACAGCAACCGCTGGGTGTTCGGTGGAGGAACCAAACTGA |
| | | | | CTGTCCTA |
| 507 | IgE Ag | rhesus | nt | GAATTCCACCATGGGATGGAGCTGTATCATCCTCTTCTTGGTAGCAACAGCTACAGGTAAGGGGC |
| | | | | TCACAGTAGCAGGCTTGAGGTCTGGACATATATATGGGTGACAATGACATCCACTTTGCCTTTCT |
| | | | | CTCCTTAGGGTGTACACTCCCAGGTCCAACTGCACCAGCCTGGGGCTGAGCTTGTGAAGCCTGGG |
| | | | | GCTTCAGTGAAGCTGTCCTGCAAGGCTTCTGGCTACACCTTCACCAGCTACTGGATGCACTGGGT |
| | | | | GAAGCAGAGGCCTGGACGAGGCCTTGAGTGGATTGGAAGGATTGATCCTAATAGTGGTGGTACTA |
| | | | | AGTACAATGAGAAGTTCAAGAGCAAGGCCACACTGACTGTAGACAAACCCTCCAGCACAGCCTAC |
| | | | | ATGCAGCTCAGCAGCCTGACATCTGAGGACTCTGCGGTCTATTATTGTGCAAGATACGATTACTA |
| | | | | CGGTAGTAGCTACTTTGACTACTGGGGCCAAGGCACCACTCTCACAGTCTCCTCAGGTGAGTCCT |
| | | | | TACAACCTCTCTCTTCTATTCAGCTTAAATAGATTTTACTGCATTTGTTGGGGGGGAAATGTGTG |
| | | | | TATCTGAATTTCAGGTCATGAAGGACTAGGGACACCTTGGGAGTCAGAAAGGGTCATTGGGAGCC |
| | | | | CTGGCTGATGCAGACAGACATCCTCAGCTCCCAGACTTCATGGCCAGAGATTTATAGGGATCCAC |
| | | | | TAGTTCTAGATGTCCCACACCGCGGTCACATGGCACCACCTCTCTTGCAGCCTCCATACAGAGCC |
| | | | | CATTCGTCTTCCCCTTGATCCCCTGCTGCAAACACATTGCCTCCAATGCCACCTCCGTGACTCTG |
| | | | | GGCTGCCTGGCCACGGGCTACTTCCCGGAGCCGGTGATGGTCACTTGGGACGCAGGCTCCCTCAA |
| | | | | CCGGTCAACTATGACCTTACCAGCCACCACCTTCACGCCCTCTGGTCACTATGCCACCATCAGCT |
| | | | | TGCTGACCGTCTCGGGTGCGTGGGCCAAGGAGACTTTCACCTGCCATGTGGTACACACTCCATCG |
| | | | | TCCGCAGACAAGGAGGTTAACAAAACCTTCGGCGTCTGCTCCAGGAACTTCACCCCGCCCACCGT |
| | | | | GAAGATCTTACAGTCGTCCTGCGACGATGACGGGCACTTCCCCCCGACCATCCAGCTCCTGTGCC |
| | | | | TCATCTCTGGGTACACCCCAGGGGCTATCAACGTCACCTGGCTGGAGAACGGGCAGGTCATGAAA |
| | | | | GTGAACTCGCCCACCCCCCCTGCAACGCAGGAGGGTGAGCTGGCCTCCACACAAAGCGAGTTTAC |
| | | | | CCTCGCTCAGAAGCAGTGGCTGACAGACCGCAACTACACCTGCCAAGTCACCTATCAAGGTACCA |
| | | | | CCTATAACGACAGCACCAAGAAGTGTGCAGATTCCAACCCGAGAGGGGTGAGCGCCTACCTAAGC |
| | | | | CGGCCCAGCCCGTTCGACCTGTTCATCAGCAAGTCGCCCACGATCACCTGTCTGGTGGTGGACCT |
| | | | | GGCACCCAGCAAGGAGACCGTGAACCTGACCTGGTCCCGGGCCAGTGGGAAGCCTGTGCCCCACA |
| | | | | TCCCCACAACGGAGAAGAAGCAGCGCAATGGCACGTTAACCGTCACGTCCATCCTGCCGGTAGTC |
| | | | | ACCCAAGACTGGATCGAGGGGGAGACCTACCAGTGCAGAGTCACCCACCCCCACCTGCCCAGGGC |
| | | | | CCTCGTGCGGTCCATGACCAAGACCAGCGGCCCGCGTGCTGCCCCGGAAGTCTATGTGTTTGCGA |
| | | | | CGCCGGAGAAGCTGGAGAGCCGGGACAAGCGCACCCTCGCCTGCCTGATCCAGAACTTCATGCCT |
| | | | | GAAGACATCTCGGTGCAGTGGCTGCACAGCGATGTGCAGCTCCCGGACGCCCGGCACAGCGTGAC |
| | | | | GCAGCCCCGCAAGACCAAGGGCTCCGGCTTCTTCGTCTTCAGCCGCCTGGAAGTGACCAAGGCCG |
| | | | | AATGGGAGCAGAAAGATGAGTTCATCTGCCGTGCAGTCCATGAGGCAGCGAGCCCCTCATGGATC |
| | | | | GTCCAGCAAGCGGTGTCTGTAAATCCCGAGCTGGACGTGTGCGTGGAGGAGGCCGAGGGCGAGGC |
| | | | | GCCGTGGACGTGGACCGGCCTCTGCATCTTCGCCGCACTCTTCCTGCTCAGCGTGAGCTACAGCG |
| | | | | CCGCCCTCACGCTCCTCATGGTGCAGCGGTTCCTCTCAGCCACGCGGCAGGGGAGGCCCCAGACC |
| | | | | TCCCTCGACTACACCAACGTCCTCCAGCCCCACGCCTAGTCTAGAGTCGAC |
| 508 | IgE Ag | human | nt | GAATTCCACCATGGGATGGAGCTGTATCATCCTCTTCTTGGTAGCAACAGCTACAGGTAAGGGGC |
| | | | | TCACAGTAGCAGGCTTGAGGTCTGGACATATATATGGGTGACAATGACATCCACTTTGCCTTTCT |
| | | | | CTCCTTAGGGTGTACACTCCCAGGTCCAACTGCACCAGCCTGGGGCTGAGCTTGTGAAGCCTGGG |
| | | | | GCTTCAGTGAAGCTGTCCTGCAAGGCTTCTGGCTACACCTTCACCAGCTACTGGATGCACTGGGT |
| | | | | GAAGCAGAGGCCTGGACGAGGCCTTGAGTGGATTGGAAGGATTGATCCTAATAGTGGTGGTACTA |
| | | | | AGTACAATGAGAAGTTCAAGAGCAAGGCCACACTGACTGTAGACAAACCCTCCAGCACAGCCTAC |
| | | | | ATGCAGCTCAGCAGCCTGACATCTGAGGACTCTGCGGTCTATTATTGTGCAAGATACGATTACTA |
| | | | | CGGTAGTAGCTACTTTGACTACTGGGGCCAAGGCACCACTCTCACAGTCTCCTCAGGTGAGTCCT |
| | | | | TACAACCTCTCTCTTCTATTCAGCTTAAATAGATTTTACTGCATTTGTTGGGGGGGAAATGTGTG |
| | | | | TATCTGAATTTCAGGTCATGAAGGACTAGGGACACCTTGGGAGTCAGAAAGGGTCATTGGGAGCC |
| | | | | CTGGCTGATGCAGACAGACATCCTCAGCTCCCAGACTTCATGGCCAGAGATTTATAGGGGATCCC |
| | | | | TGCCACGGGGTCCCCAGCTCCCCCATCCAGGCCCCCCAGGCTGATGGGCGCTGGCCTGAGGCTGG |
| | | | | CACTGACTAGGTTCTGTCCTCACAGCCTCCACACAGAGCCCATCCGTCTTCCCCTTGACCCGCTG |
| | | | | CTGCAAAAACATTCCCTCCAATGCCACCTCCGTGACTCTGGGCTGCCTGGCCACGGGCTACTTCC |
| | | | | CGGAGCCGGTGATGGTGACCTGGGACACAGGCTCCCTCAACGGGACAACTATGACCTTACCAGCC |
| | | | | ACCACCCTCACGCTCTCTGGTCACTATGCCACCATCAGCTTGCTGACCGTCTCGGGTGCGTGGGC |
| | | | | CAAGCAGATGTTCACCTGCCGTGTGGCACACACTCCATCGTCCACAGACTGGGTCGACAACAAAA |
| | | | | CCTTCAGCGGTAAGAGAGGGCCAAGCTCAGAGACCACAGTTCCCAGGAGTGCCAGGCTGAGGGCT |
| | | | | GGCAGAGTGGGCAGGGGTTGAGGGGGTGGGTGGGCTCAAACGTGGGAACACCCAGCATGCCTGGG |
| | | | | GACCCGGGCCAGGACGTGGGGGCAAGAGGAGGGCACACAGAGCTCAGAGAGGCCAACAACCCTCA |
| | | | | TGACCACCAGCTCTCCCCCAGTCTGCTCCAGGGACTTCACCCCGCCCACCGTGAAGATCTTACAG |
| | | | | TCGTCCTGCGACGGCGGCGGGCACTTCCCCCCGACCATCCAGCTCCTGTGCCTCGTCTCTGGGTA |
| | | | | CACCCCAGGGACTATCAACATCACCTGGCTGGAGGACGGGCAGGTCATGGACGTGGACTTGTCCA |
| | | | | CCGCCTCTACCACGCAGGAGGGTGAGCTGGCCTCCACACAAAGCGAGCTCACCCTCAGCCAGAAG |
| | | | | CACTGGCTGTCAGACCGCACCTACACCTGCCAGGTCACCTATCAAGGTCACACCTTTGAGGACAG |
| | | | | CACCAAGAAGTGTGCAGGTACGTTCCCACCTGCCCTGGTGGCCGCCACGGAGGCCAGAGAAGAGG |
| | | | | GGCGGGTGGGCCTCACACAGCCCTCCGGTGTACCACAGATTCCAACCCGAGAGGGGTGAGCGCCT |
| | | | | ACCTAAGCCGGCCCAGCCCGTTCGACCTGTTCATCCGCAAGTCGCCCACGATCACCTGTCTGGTG |
| | | | | GTGGACCTGGCACCCAGCAAGGGGACCGTGAACCTGACCTGGTCCCGGGCCAGTGGGAAGCCTGT |
| | | | | GAACCACTCCACCAGAAAGGAGGAGAAGCAGCGCAATGGCACGTTAACCGTCACGTCCACCCTGC |
| | | | | CGGTGGGCACCCGAGACTGGATCGAGGGGGAGACCTACCAGTGCAGGGTGACCCACCCCCACCTG |
| | | | | CCCAGGGCCCTCATGCGGTCCACGACCAAGACCAGCGGTGAGCCATGGGCAGGCCGGGGTCGTGG |
| | | | | GGGAAGGGAGGGAGCGAGTGAGCGGGGCCCGGGCTGACCCCACGTCTGGCCACAGGCCCGCGTGC |
| | | | | TGCCCCGGAAGTCTATGCGTTTGCGACGCCGGAGTGGCCGGGGAGCCGGGACAAGCGCACCCTCG |
| | | | | CCTGCCTGATCCAGAACTTCATGCCTGAGGACATCTCGGTGCAGTGGCTGCACAACGAGGTGCAG |
| | | | | CTCCCGGACGCCCGGCACAGCACGACGCAGCCCCGCAAGACCAAGGGCTCCGGCTTCTTCGTCTT |
| | | | | CAGCCGCCTGGAGGTGACCAGGGCCGAATGGGAGCAGAAAGATGAGTTCATCTGCCGTGCAGTCC |
| | | | | ATGAGGCAGCGAGCCCCTCACAGACCGTCCAGCGAGCGGTGTCTGTAAATCCCGAGCTGGACGTG |
| | | | | TGCGTGGAGGAGGCCGAGGGCGAGGCGCCGTGGACGTGGACCGGCCTCTGCATCTTCGCCGCACT |
| | | | | CTTCCTGCTCAGCGTGAGCTACAGCGCCGCCCTCACGCTCCTCATGGTGCAGCGGTTCCTCTCAG |
| | | | | CCACGCGGCAGGGGAGGCCCCAGACCTCCCTCGACTACACCAACGTCCTCCAGCCCCACGCCTAG |
| | | | | TCTAGAGTCGAC |

1. A polypeptide comprising an antibody comprising a first binding domain, which is an antigen-interaction site, capable of binding to an epitope of human and Callithrix jacchus, Saquinus oedipus or Saimiri sciureus CD3ε (epsilon) chain, wherein the epitope is part of an amino acid sequence comprised in the group consisting of SEQ ID NO: 2, 4, 6, or 8 and comprises at least the amino acid sequence Gln-Asp-Gly-Asn-Glu, and a second binding domain capable of binding to EGFR, Her2/neu or IgE of a human and/or a non-chimpanzee primate.

2. The polypeptide according to claim 1, wherein the epitope is part of an amino acid sequence comprised in the group consisting of SEQ ID NO: 2, 4, 6, and 8 and comprises at least the amino acid sequence Gln-Asp-Gly-Asn-Glu.

3. The polypeptide according to claim 1, wherein the first binding domain comprises a VL region comprising CDR-L1, CDR-L2 and CDR-L3 selected from:
(a) CDR-L1 as depicted in SEQ ID NO:27, CDR-L2 as depicted in SEQ ID NO:28 and CDR-L3 as depicted in SEQ ID NO:29;
(b) CDR-L1 as depicted in SEQ ID NO:117, CDR-L2 as depicted in SEQ ID NO:118 and CDR-L3 as depicted in SEQ ID NO:119; and
(c) CDR-L1 as depicted in SEQ ID NO:153, CDR-L2 as depicted in SEQ ID NO:154 and CDR-L3 as depicted in SEQ ID NO:155.

4. The polypeptide according to claim 1, wherein the first binding comprises a VH region comprising CDR-H1, CDR-H2 and CDR-H3 selected from:
(a) CDR-H1 as depicted in SEQ ID NO:12, CDR-H2 as depicted in SEQ ID NO:13 and CDR-H3 as depicted in SEQ ID NO:14;
(b) CDR-H1 as depicted in SEQ ID NO:30, CDR-H2 as depicted in SEQ ID NO:31 and CDR-H3 as depicted in SEQ ID NO:32;
(c) CDR-H1 as depicted in SEQ ID NO:48, CDR-H2 as depicted in SEQ ID NO:49 and CDR-H3 as depicted in SEQ ID NO:50;
(d) CDR-H1 as depicted in SEQ ID NO:66, CDR-H2 as depicted in SEQ ID NO:67 and CDR-H3 as depicted in SEQ ID NO:68;
(e) CDR-H1 as depicted in SEQ ID NO:84, CDR-H2 as depicted in SEQ ID NO:85 and CDR-H3 as depicted in SEQ ID NO:86;
(f) CDR-H1 as depicted in SEQ ID NO:102, CDR-H2 as depicted in SEQ ID NO:103 and CDR-H3 as depicted in SEQ ID NO:104;
(g) CDR-H1 as depicted in SEQ ID NO:120, CDR-H2 as depicted in SEQ ID NO:121 and CDR-H3 as depicted in SEQ ID NO:122;
(h) CDR-H1 as depicted in SEQ ID NO:138, CDR-H2 as depicted in SEQ ID NO:139 and CDR-H3 as depicted in SEQ ID NO:140;
(i) CDR-H1 as depicted in SEQ ID NO:156, CDR-H2 as depicted in SEQ ID NO:157 and CDR-H3 as depicted in SEQ ID NO:158; and
(j) CDR-H1 as depicted in SEQ ID NO:174, CDR-H2 as depicted in SEQ ID NO:175 and CDR-H3 as depicted in SEQ ID NO:176.

5. The polypeptide according to claim 1, wherein the first binding domain comprises a VL region selected from the group consisting of a VL region as depicted in SEQ ID NO:35, 39, 125, 129, 161 or 165.

6. The polypeptide according to claim 1, wherein the first binding domain comprises a VH region selected from the group consisting of a VH region as depicted in SEQ ID NO:15, 19, 33, 37, 51, 55, 69, 73, 87, 91, 105, 109, 123, 127, 141, 145, 159, 163, 177 or 181.

7. The polypeptide according to claim 1, wherein the first binding domain comprises a VL region and a VH region selected from the group consisting of:
(a) a VL region as depicted in SEQ ID NO:17 or 21 and a VH region as depicted in SEQ ID NO:15 or 19;
(b) a VL region as depicted in SEQ ID NO:35 or 39 and a VH region as depicted in SEQ ID NO:33 or 37;
(c) a VL region as depicted in SEQ ID NO:53 or 57 and a VH region as depicted in SEQ ID NO:51 or 55;
(d) a VL region as depicted in SEQ ID NO:71 or 75 and a VH region as depicted in SEQ ID NO:69 or 73;
(e) a VL region as depicted in SEQ ID NO:89 or 93 and a VH region as depicted in SEQ ID NO:87 or 91;
(f) a VL region as depicted in SEQ ID NO:107 or 111 and a VH region as depicted in SEQ ID NO:105 or 109;
(g) a VL region as depicted in SEQ ID NO:125 or 129 and a VH region as depicted in SEQ ID NO:123 or 127;
(h) a VL region as depicted in SEQ ID NO:143 or 147 and a VH region as depicted in SEQ ID NO:141 or 145;
(i) a VL region as depicted in SEQ ID NO:161 or 165 and a VH region as depicted in SEQ ID NO:159 or 163; and
(j) a VL region as depicted in SEQ ID NO:179 or 183 and a VH region as depicted in SEQ ID NO:177 or 181.

8. The polypeptide according to claim 7, wherein the first binding domain comprises an amino acid sequence selected from the group consisting of SEQ ID NO:23, 25, 41, 43, 59, 61, 77, 79, 95, 97, 113, 115, 131, 133, 149, 151, 167, 169, 185 or 187.

9. The polypeptide according to claim 1, wherein said polypeptide is a bispecific single chain antibody molecule.

10. The polypeptide according to claim 9, wherein the bispecific single chain antibody molecule comprises a group of the following sequences as CDR H1, CDR H2, CDR H3, CDR L1, CDR L2 and CDR L3 in the second binding domain selected from the group consisting of SEQ ID NOs:441-446, SEQ ID NOs:453-458, SEQ ID NOs:463-468, SEQ ID NOs:481-486.

11. The polypeptide according to claim 9, wherein the bispecific single chain antibody molecule comprises a sequence selected from the group consisting of:
(a) an amino acid sequence as depicted in any of SEQ ID NOs:389, 391, 393, 395, 397, 399, 409, 411, 413, 415, 417, 419, 429, 431, 433, 435, 437, 439, 447, 449, 451, 469, 471, 473, 475, 477, 479, 495, 497, 499, 501, 503 and 505; and
(b) an amino acid sequence encoded by a nucleic acid sequence as depicted in any of SEQ ID NOs:390, 392, 394, 396, 398, 400, 410, 412, 414, 416, 418, 420, 430, 432, 434, 436, 438, 440, 448, 450, 452, 470, 472, 474, 476, 478, 480, 496, 498, 500, 502, 504 and 506.

12. A nucleic acid sequence encoding a polypeptide as defined in claim 1.

13. A vector, which comprises a nucleic acid sequence as defined in claim 12.

14.-15. (canceled)

16. A host cell transformed or transfected with the nucleic acid sequence or a vector containing the nucleic acid sequence defined in claim 12.

17. A process for the production of a polypeptide according to claim 1, said process comprising culturing a host cell transformed or transfected with a nucleic acid sequence or a vector containing a nucleic acid sequence encoding the polypeptide as defined in claim 1 under conditions allowing the expression of the polypeptide and recovering the produced polypeptide from the culture.

18. A pharmaceutical composition comprising a polypeptide according to claim 1, and optionally comprising suitable formulations of carrier, stabilizers and/or excipients.

19.-27. (canceled)

28. A method for the prevention, treatment or amelioration of a disease in a subject in the need thereof, said method comprising the administration of an effective amount of the pharmaceutical composition according to claim 18 to the subject.

29. The method according to claim 28, wherein said disease is a proliferative disease, a tumorous disease, or an immunological disorder.

30. The method according to claim 29, wherein said tumorous disease is a malignant disease.

31. The method according to claim 28, wherein said pharmaceutical composition is administered in combination with an additional drug.

32. The method of according to claim 31, wherein said drug is a non-proteinaceous compound or a proteinaceous compound.

33. The method according to claim 32, wherein said proteinaceous compound or non-proteinaceous compound is administered simultaneously or non-simultaneously with the pharmaceutical composition.

34. The method according to claim 28, wherein said subject is a human.

35. A kit comprising a polypeptide as defined in claim 1, a nucleic acid sequence encoding the polypeptide as defined in claim 1, a vector comprising the nucleic acid sequence, or a host cell transformed or transfected with the nucleic acid sequence or a vector containing the nucleic acid sequence.

The application's sequence listing, which the Patent Office published only in electronic form, follows.

SEQUENCE LISTING (508 sequences)

SEQ ID NO: 1 - protein, 105 aa, Homo sapiens
QDGNEEMGGITQTPYKVSISGTTVILTCPQYPGSEILWQHNDKNIGGDEDDKNIGSDEDHLSLKEFSELEQSGYYVCYPRGSKPEDANFYLYLRARVCENCMEMD

SEQ ID NO: 2 - protein, 27 aa, Homo sapiens
QDGNEEMGGITQTPYKVSISGTTVILT

SEQ ID NO: 3 - protein, 96 aa, Callithrix jacchus
QDGNEEMGDTTQNPYKVSISGTTVTLTCPRYDGHEIKWLVNSQNKEGHEDHLLLEDFSEMEQSGYYACLSKETPAEEASHYLYLKARVCENCVEVD

SEQ ID NO: 4 - protein, 27 aa, Callithrix jacchus
QDGNEEMGDTTQNPYKVSISGTTVTLT

SEQ ID NO: 5 - protein, 96 aa, Saguinus oedipus; identical to SEQ ID NO: 3

SEQ ID NO: 6 - protein, 27 aa, Saguinus oedipus
QDGNEEMGDTTQNPYKVSISGTTVTLT

SEQ ID NO: 7 - protein, 96 aa, Saimiri sciureus
QDGNEEIGDTTQNPYKVSISGTTVTLTCPRYDGQEIKWLVNDQNKEGHEDHLLLEDFSEMEQSGYYACLSKETPTEEASHYLYLKARVCENCVEVD

SEQ ID NO: 8 - protein, 27 aa, Saimiri sciureus
QDGNEEIGDTTQNPYKVSISGTTVTLT

SEQ ID NO: 9 - protein, 14 aa, Artificial Sequence
  CDR-L1 of F6A
GSSTGAVTSGYYPN

SEQ ID NO: 10 - protein, 7 aa, Artificial Sequence
  CDR-L2 of F6A
GTKFLAP

SEQ ID NO: 11 - protein, 9 aa, Artificial Sequence
  CDR-L3 of F6A
ALWYSNRWV

SEQ ID NO: 12 - protein, 5 aa, Artificial Sequence
  CDR-H1 of F6A
IYAMN

SEQ ID NO: 13 - protein, 19 aa, Artificial Sequence
  CDR-H2 of F6A
RIRSKYNNYATYYADSVKS

SEQ ID NO: 14 - protein, 14 aa, Artificial Sequence
  CDR-H3 of F6A
HGNFGNSYVSFFAY

SEQ ID NO: 15 - protein, 125 aa, Artificial Sequence
  VH of F6A
EVQLVESGGGLVQPGGSLKLSCAASGFTFNIYAMNWVRQAPGKGLEWVARIRSKYNNYATYYADSVKSRFTISRDDSKNTAYLQMNNLKTEDTAVYYCVRHGNFGNSYVSFFAYWGQGTLVTVSS

SEQ ID NO: 16 - DNA, 375 bp, Artificial Sequence
  VH of F6A
gaggtgcagctggtcgagtctggaggaggattggtgcagcctggagggtcattgaaactctcatgtgcagcctctggattcaccttcaatatctacgccatgaactgggtccgccaggctccaggaaagggtttggaatgggttgctcgcataagaagtaaatataataattatgcaacatattatgccgattcagtgaaaagcaggttcaccatctccagagatgattcaaaaaacactgcctatctacaaatgaacaacttgaaaactgaggacactgccgtgtactactgtgtgagacatgggaacttcggtaatagctacgtatccttcttcgcttactggggccaagggactctggtcaccgtctcctca

SEQ ID NO: 17 - protein, 109 aa, Artificial Sequence
  VL of F6A
QTVVTQEPSLTVSPGGTVTLTCGSSTGAVTSGYYPNWVQQKPGQAPRGLIGGTKFLAPGTPARFSGSLLGGKAALTLSGVQPEDEAEYYCALWYSNRWVFGGGTKLTVL

SEQ ID NO: 18 - DNA, 327 bp, Artificial Sequence
  VL of F6A
cagactgttgtgactcaggaaccttcactcaccgtatcacctggtggaacagtcacactcacttgtggctcctcgactggggctgttacatctggctactacccaaactgggtccaacaaaaaccaggtcaggcaccccgtggtctaataggtgggactaagttcctcgcccccggtactcctgccagattctcaggctccctgcttggaggcaaggctgccctcaccctctcaggggtacagccagaggatgaggcagaatattactgtgctctatggtacagcaaccgctgggtgttcggtggaggaaccaaactgactgtccta

SEQ ID NO: 19 - protein, 125 aa, Artificial Sequence
  VH-P of F6A
EVQLLESGGGLVQPGGSLKLSCAASGFTFNIYAMNWVRQAPGKGLEWVARIRSKYNNYATYYADSVKSRFTISRDDSKNTAYLQMNNLKTEDTAVYYCVRHGNFGNSYVSFFAYWGQGTLVTVSS

SEQ ID NO: 20 - DNA, 375 bp, Artificial Sequence
  VH-P of F6A
gaggtgcagctgctcgagtctggaggaggattggtgcagcctggagggtcattgaaactctcatgtgcagcctctggattcaccttcaatatctacgccatgaactgggtccgccaggctccaggaaagggtttggaatgggttgctcgcataagaagtaaatataataattatgcaacatattatgccgattcagtgaaaagcaggttcaccatctccagagatgattcaaaaaacactgcctatctacaaatgaacaacttgaaaactgaggacactgccgtgtactactgtgtgagacatgggaacttcggtaatagctacgtatccttcttcgcttactggggccaagggactctggtcaccgtctcctca

SEQ ID NO: 21 - protein, 109 aa, Artificial Sequence
  VL-P of F6A
ELVVTQEPSLTVSPGGTVTLTCGSSTGAVTSGYYPNWVQQKPGQAPRGLIGGTKFLAPGTPARFSGSLLGGKAALTLSGVQPEDEAEYYCALWYSNRWVFGGGTKLTVL

SEQ ID NO: 22 - DNA, 327 bp, Artificial Sequence
  VL-P of F6A
gagctcgttgtgactcaggaaccttcactcaccgtatcacctggtggaacagtcacactcacttgtggctcctcgactggggctgttacatctggctactacccaaactgggtccaacaaaaaccaggtcaggcaccccgtggtctaataggtgggactaagttcctcgcccccggtactcctgccagattctcaggctccctgcttggaggcaaggctgccctcaccctctcaggggtacagccagaggatgaggcagaatattactgtgctctatggtacagcaaccgctgggtgttcggtggaggaaccaaactgactgtccta

SEQ ID NO: 23 - protein, 249 aa, Artificial Sequence
  VH-VL of F6A
EVQLVESGGGLVQPGGSLKLSCAASGFTFNIYAMNWVRQAPGKGLEWVARIRSKYNNYATYYADSVKSRFTISRDDSKNTAYLQMNNLKTEDTAVYYCVRHGNFGNSYVSFFAYWGQGTLVTVSSGGGGSGGGGSGGGGSQTVVTQEPSLTVSPGGTVTLTCGSSTGAVTSGYYPNWVQQKPGQAPRGLIGGTKFLAPGTPARFSGSLLGGKAALTLSGVQPEDEAEYYCALWYSNRWVFGGGTKLTVL

SEQ ID NO: 24 - DNA, 747 bp, Artificial Sequence
  VH-VL of F6A
gaggtgcagctggtcgagtctggaggaggattggtgcagcctggagggtcattgaaactctcatgtgcagcctctggattcaccttcaatatctacgccatgaactgggtccgccaggctccaggaaagggtttggaatgggttgctcgcataagaagtaaatataataattatgcaacatattatgccgattcagtgaaaagcaggttcaccatctccagagatgattcaaaaaacactgcctatctacaaatgaacaacttgaaaactgaggacactgccgtgtactactgtgtgagacatgggaacttcggtaatagctacgtatccttcttcgcttactggggccaagggactctggtcaccgtctcctcaggtggtggtggttctggcggcggcggctccggtggtggtggttctcagactgttgtgactcaggaaccttcactcaccgtatcacctggtggaacagtcacactcacttgtggctcctcgactggggctgttacatctggctactacccaaactgggtccaacaaaaaccaggtcaggcaccccgtggtctaataggtgggactaagttcctcgcccccggtactcctgccagattctcaggctccctgcttggaggcaaggctgccctcaccctctcaggggtacagccagaggatgaggcagaatattactgtgctctatggtacagcaaccgctgggtgttcggtggaggaaccaaactgactgtccta

SEQ ID NO: 25 - protein, 249 aa, Artificial Sequence
  VH-VL-P of F6A
EVQLLESGGGLVQPGGSLKLSCAASGFTFNIYAMNWVRQAPGKGLEWVARIRSKYNNYATYYADSVKSRFTISRDDSKNTAYLQMNNLKTEDTAVYYCVRHGNFGNSYVSFFAYWGQGTLVTVSSGGGGSGGGGSGGGGSELVVTQEPSLTVSPGGTVTLTCGSSTGAVTSGYYPNWVQQKPGQAPRGLIGGTKFLAPGTPARFSGSLLGGKAALTLSGVQPEDEAEYYCALWYSNRWVFGGGTKLTVL

SEQ ID NO: 26 - DNA, 747 bp, Artificial Sequence
  VH-VL-P of F6A
gaggtgcagctgctcgagtctggaggaggattggtgcagcctggagggtcattgaaactctcatgtgcagcctctggattcaccttcaatatctacgccatgaactgggtccgccaggctccaggaaagggtttggaatgggttgctcgcataagaagtaaatataataattatgcaacatattatgccgattcagtgaaaagcaggttcaccatctccagagatgattcaaaaaacactgcctatctacaaatgaacaacttgaaaactgaggacactgccgtgtactactgtgtgagacatgggaacttcggtaatagctacgtatccttcttcgcttactggggccaagggactctggtcaccgtctcctcaggtggtggtggttctggcggcggcggctccggtggtggtggttctgagctcgttgtgactcaggaaccttcactcaccgtatcacctggtggaacagtcacactcacttgtggctcctcgactggggctgttacatctggctactacccaaactgggtccaacaaaaaccaggtcaggcaccccgtggtctaataggtgggactaagttcctcgcccccggtactcctgccagattctcaggctccctgcttggaggcaaggctgccctcaccctctcaggggtacagccagaggatgaggcagaatattactgtgctctatggtacagcaaccgctgggtgttcggtggaggaaccaaactgactgtccta

SEQ ID NO: 27 - protein, 14 aa, Artificial Sequence
  CDR-L1 of H2C
GSSTGAVTSGYYPN

SEQ ID NO: 28 - protein, 7 aa, Artificial Sequence
  CDR-L2 of H2C
GTKFLAP

SEQ ID NO: 29 - protein, 9 aa, Artificial Sequence
  CDR-L3 of H2C
ALWYSNRWV

SEQ ID NO: 30 - protein, 5 aa, Artificial Sequence
  CDR-H1 of H2C
KYAMN

SEQ ID NO: 31 - protein, 19 aa, Artificial Sequence
  CDR-H2 of H2C
RIRSKYNNYATYYADSVKD

SEQ ID NO: 32 - protein, 14 aa, Artificial Sequence
  CDR-H3 of H2C
HGNFGNSYISYWAY

SEQ ID NO: 33 - protein, 125 aa, Artificial Sequence
  VH of H2C
EVQLVESGGGLVQPGGSLKLSCAASGFTFNKYAMNWVRQAPGKGLEWVARIRSKYNNYATYYADSVKDRFTISRDDSKNTAYLQMNNLKTEDTAVYYCVRHGNFGNSYISYWAYWGQGTLVTVSS

SEQ ID NO: 34 - DNA, 375 bp, Artificial Sequence
  VH of H2C
gaggtgcagctggtcgagtctggaggaggattggtgcagcctggagggtcattgaaactctcatgtgcagcctctggattcaccttcaataagtacgccatgaactgggtccgccaggctccaggaaagggtttggaatgggttgctcgcataagaagtaaatataataattatgcaacatattatgccgattcagtgaaagacaggttcaccatctccagagatgattcaaaaaacactgcctatctacaaatgaacaacttgaaaactgaggacactgccgtgtactactgtgtgagacatgggaacttcggtaatagctacatatcctactgggcttactggggccaagggactctggtcaccgtctcctca

SEQ ID NO: 35 - protein, 109 aa, Artificial Sequence; identical to SEQ ID NO: 17
  VL of H2C

SEQ ID NO: 36 - DNA, 327 bp, Artificial Sequence; identical to SEQ ID NO: 18
  VL of H2C

SEQ ID NO: 37 - protein, 125 aa, Artificial Sequence
  VH-P of H2C
EVQLLESGGGLVQPGGSLKLSCAASGFTFNKYAMNWVRQAPGKGLEWVARIRSKYNNYATYYADSVKDRFTISRDDSKNTAYLQMNNLKTEDTAVYYCVRHGNFGNSYISYWAYWGQGTLVTVSS

SEQ ID NO: 38 - DNA, 375 bp, Artificial Sequence
  VH-P of H2C
gaggtgcagctgctcgagtctggaggaggattggtgcagcctggagggtcattgaaactctcatgtgcagcctctggattcaccttcaataagtacgccatgaactgggtccgccaggctccaggaaagggtttggaatgggttgctcgcataagaagtaaatataataattatgcaacatattatgccgattcagtgaaagacaggttcaccatctccagagatgattcaaaaaacactgcctatctacaaatgaacaacttgaaaactgaggacactgccgtgtactactgtgtgagacatgggaacttcggtaatagctacatatcctactgggcttactggggccaagggactctggtcaccgtctcctca

SEQ ID NO: 39 - protein, 109 aa, Artificial Sequence; identical to SEQ ID NO: 21
  VL-P of H2C

SEQ ID NO: 40 - DNA, 327 bp, Artificial Sequence; identical to SEQ ID NO: 22
  VL-P of H2C

SEQ ID NO: 41 - protein, 249 aa, Artificial Sequence
  VH-VL of H2C
EVQLVESGGGLVQPGGSLKLSCAASGFTFNKYAMNWVRQAPGKGLEWVARIRSKYNNYATYYADSVKDRFTISRDDSKNTAYLQMNNLKTEDTAVYYCVRHGNFGNSYISYWAYWGQGTLVTVSSGGGGSGGGGSGGGGSQTVVTQEPSLTVSPGGTVTLTCGSSTGAVTSGYYPNWVQQKPGQAPRGLIGGTKFLAPGTPARFSGSLLGGKAALTLSGVQPEDEAEYYCALWYSNRWVFGGGTKLTVL

SEQ ID NO: 42 - DNA, 747 bp, Artificial Sequence
  VH-VL of H2C
gaggtgcagctggtcgagtctggaggaggattggtgcagcctggagggtcattgaaactctcatgtgcagcctctggattcaccttcaataagtacgccatgaactgggtccgccaggctccaggaaagggtttggaatgggttgctcgcataagaagtaaatataataattatgcaacatattatgccgattcagtgaaagacaggttcaccatctccagagatgattcaaaaaacactgcctatctacaaatgaacaacttgaaaactgaggacactgccgtgtactactgtgtgagacatgggaacttcggtaatagctacatatcctactgggcttactggggccaagggactctggtcaccgtctcctcaggtggtggtggttctggcggcggcggctccggtggtggtggttctcagactgttgtgactcaggaaccttcactcaccgtatcacctggtggaacagtcacactcacttgtggctcctcgactggggctgttacatctggctactacccaaactgggtccaacaaaaaccaggtcaggcaccccgtggtctaataggtgggactaagttcctcgcccccggtactcctgccagattctcaggctccctgcttggaggcaaggctgccctcaccctctcaggggtacagccagaggatgaggcagaatattactgtgctctatggtacagcaaccgctgggtgttcggtggaggaaccaaactgactgtccta

SEQ ID NO: 43 - protein, 249 aa, Artificial Sequence
  VH-VL-P of H2C
EVQLLESGGGLVQPGGSLKLSCAASGFTFNKYAMNWVRQAPGKGLEWVARIRSKYNNYATYYADSVKDRFTISRDDSKNTAYLQMNNLKTEDTAVYYCVRHGNFGNSYISYWAYWGQGTLVTVSSGGGGSGGGGSGGGGSELVVTQEPSLTVSPGGTVTLTCGSSTGAVTSGYYPNWVQQKPGQAPRGLIGGTKFLAPGTPARFSGSLLGGKAALTLSGVQPEDEAEYYCALWYSNRWVFGGGTKLTVL

SEQ ID NO: 44 - DNA, 747 bp, Artificial Sequence
  VH-VL-P of H2C
gaggtgcagctgctcgagtctggaggaggattggtgcagcctggagggtcattgaaactctcatgtgcagcctctggattcaccttcaataagtacgccatgaactgggtccgccaggctccaggaaagggtttggaatgggttgctcgcataagaagtaaatataataattatgcaacatattatgccgattcagtgaaagacaggttcaccatctccagagatgattcaaaaaacactgcctatctacaaatgaacaacttgaaaactgaggacactgccgtgtactactgtgtgagacatgggaacttcggtaatagctacatatcctactgggcttactggggccaagggactctggtcaccgtctcctcaggtggtggtggttctggcggcggcggctccggtggtggtggttctgagctcgttgtgactcaggaaccttcactcaccgtatcacctggtggaacagtcacactcacttgtggctcctcgactggggctgttacatctggctactacccaaactgggtccaacaaaaaccaggtcaggcaccccgtggtctaataggtgggactaagttcctcgcccccggtactcctgccagattctcaggctccctgcttggaggcaaggctgccctcaccctctcaggggtacagccagaggatgaggcagaatattactgtgctctatggtacagcaaccgctgggtgttcggtggaggaaccaaactgactgtccta

SEQ ID NO: 45 - protein, 14 aa, Artificial Sequence
  CDR-L1 of H1E
GSSTGAVTSGYYPN

SEQ ID NO: 46 - protein, 7 aa, Artificial Sequence
  CDR-L2 of H1E
GTKFLAP

SEQ ID NO: 47 - protein, 9 aa, Artificial Sequence
  CDR-L3 of H1E
ALWYSNRWV

SEQ ID NO: 48 - protein, 5 aa, Artificial Sequence
  CDR-H1 of H1E
SYAMN

SEQ ID NO: 49 - protein, 19 aa, Artificial Sequence
  CDR-H2 of H1E
RIRSKYNNYATYYADSVKG

SEQ ID NO: 50 - protein, 14 aa, Artificial Sequence
  CDR-H3 of H1E
HGNFGNSYLSFWAY

SEQ ID NO: 51 - protein, 125 aa, Artificial Sequence
  VH of H1E
EVQLVESGGGLEQPGGSLKLSCAASGFTFNSYAMNWVRQAPGKGLEWVARIRSKYNNYATYYADSVKGRFTISRDDSKNTAYLQMNNLKTEDTAVYYCVRHGNFGNSYLSFWAYWGQGTLVTVSS

SEQ ID NO: 52 - DNA, 374 bp, Artificial Sequence
  VH of H1E
gaggtgcagctggtcgagtctggaggaggattggagcagcctggagggtcattgaaactctcatgtgcagcctctggattcaccttcaattcgtacgccatgaactgggtccgccaggctccaggaaagggtttggaatgggttgctcgcataagaagtaaatataataattatgcaacatattatgccgattcagtgaaagggaggttcaccatctccagagatgattcaaaaaacactgcctatctacaaatgaacaacttgaaaactgaggacactgccgtgtactactgtgtgagacatgggaacttcggtaatagctacctatccttctgggcttactggggccaagggactctggtcaccgtctcctc

SEQ ID NO: 53 - protein, 109 aa, Artificial Sequence; identical to SEQ ID NO: 17
  VL of H1E

SEQ ID NO: 54 - DNA, 327 bp, Artificial Sequence; identical to SEQ ID NO: 18
  VL of H1E

SEQ ID NO: 55 - protein, 125 aa, Artificial Sequence
  VH-P of H1E
EVQLLESGGGLEQPGGSLKLSCAASGFTFNSYAMNWVRQAPGKGLEWVARIRSKYNNYATYYADSVKGRFTISRDDSKNTAYLQMNNLKTEDTAVYYCVRHGNFGNSYLSFWAYWGQGTLVTVSS

SEQ ID NO: 56 - DNA, 375 bp, Artificial Sequence
  VH-P of H1E
gaggtgcagctgctcgagtctggaggaggattggagcagcctggagggtcattgaaactctcatgtgcagcctctggattcaccttcaattcgtacgccatgaactgggtccgccaggctccaggaaagggtttggaatgggttgctcgcataagaagtaaatataataattatgcaacatattatgccgattcagtgaaagggaggttcaccatctccagagatgattcaaaaaacactgcctatctacaaatgaacaacttgaaaactgaggacactgccgtgtactactgtgtgagacatgggaacttcggtaatagctacctatccttctgggcttactggggccaagggactctggtcaccgtctcctca

SEQ ID NO: 57 - protein, 109 aa, Artificial Sequence; identical to SEQ ID NO: 21
  VL-P of H1E

SEQ ID NO: 58 - DNA, 327 bp, Artificial Sequence; identical to SEQ ID NO: 22
  VL-P of H1E

SEQ ID NO: 59 - protein, 249 aa, Artificial Sequence
  VH-VL of H1E
EVQLVESGGGLEQPGGSLKLSCAASGFTFNSYAMNWVRQAPGKGLEWVARIRSKYNNYATYYADSVKGRFTISRDDSKNTAYLQMNNLKTEDTAVYYCVRHGNFGNSYLSFWAYWGQGTLVTVSSGGGGSGGGGSGGGGSQTVVTQEPSLTVSPGGTVTLTCGSSTGAVTSGYYPNWVQQKPGQAPRGLIGGTKFLAPGTPARFSGSLLGGKAALTLSGVQPEDEAEYYCALWYSNRWVFGGGTKLTVL

SEQ ID NO: 60 - DNA, 747 bp, Artificial Sequence
  VH-VL of H1E
gaggtgcagctggtcgagtctggaggaggattggagcagcctggagggtcattgaaactctcatgtgcagcctctggattcaccttcaattcgtacgccatgaactgggtccgccaggctccaggaaagggtttggaatgggttgctcgcataagaagtaaatataataattatgcaacatattatgccgattcagtgaaagggaggttcaccatctccagagatgattcaaaaaacactgcctatctacaaatgaacaacttgaaaactgaggacactgccgtgtactactgtgtgagacatgggaacttcggtaatagctacctatccttctgggcttactggggccaagggactctggtcaccgtctcctcaggtggtggtggttctggcggcggcggctccggtggtggtggttctcagactgttgtgactcaggaaccttcactcaccgtatcacctggtggaacagtcacactcacttgtggctcctcgactggggctgttacatctggctactacccaaactgggtccaacaaaaaccaggtcaggcaccccgtggtctaataggtgggactaagttcctcgcccccggtactcctgccagattctcaggctccctgcttggaggcaaggctgccctcaccctctcaggggtacagccagaggatgaggcagaatattactgtgctctatggtacagcaaccgctgggtgttcggtggaggaaccaaactgactgtccta

SEQ ID NO: 61 - protein, 249 aa, Artificial Sequence
  VH-VL-P of H1E
EVQLLESGGGLEQPGGSLKLSCAASGFTFNSYAMNWVRQAPGKGLEWVARIRSKYNNYATYYADSVKGRFTISRDDSKNTAYLQMNNLKTEDTAVYYCVRHGNFGNSYLSFWAYWGQGTLVTVSSGGGGSGGGGSGGGGSELVVTQEPSLTVSPGGTVTLTCGSSTGAVTSGYYPNWVQQKPGQAPRGLIGGTKFLAPGTPARFSGSLLGGKAALTLSGVQPEDEAEYYCALWYSNRWVFGGGTKLTVL

SEQ ID NO: 62 - DNA, 747 bp, Artificial Sequence
  VH-VL-P of H1E
gaggtgcagctgctcgagtctggaggaggattggagcagcctggagggtcattgaaactctcatgtgcagcctctggattcaccttcaattcgtacgccatgaactgggtccgccaggctccaggaaagggtttggaatgggttgctcgcataagaagtaaatataataattatgcaacatattatgccgattcagtgaaagggaggttcaccatctccagagatgattcaaaaaacactgcctatctacaaatgaacaacttgaaaactgaggacactgccgtgtactactgtgtgagacatgggaacttcggtaatagctacctatccttctgggcttactggggccaagggactctggtcaccgtctcctcaggtggtggtggttctggcggcggcggctccggtggtggtggttctgagctcgttgtgactcaggaaccttcactcaccgtatcacctggtggaacagtcacactcacttgtggctcctcgactggggctgttacatctggctactacccaaactgggtccaacaaaaaccaggtcaggcaccccgtggtctaataggtgggactaagttcctcgcccccggtactcctgccagattctcaggctccctgcttggaggcaaggctgccctcaccctctcaggggtacagccagaggatgaggcagaatattactgtgctctatggtacagcaaccgctgggtgttcggtggaggaaccaaactgactgtccta

SEQ ID NO: 63 - protein, 14 aa, Artificial Sequence
  CDR-L1 of G4H
GSSTGAVTSGYYPN

SEQ ID NO: 64 - protein, 7 aa, Artificial Sequence
  CDR-L2 of G4H
GTKFLAP

SEQ ID NO: 65 - protein, 9 aa, Artificial Sequence
  CDR-L3 of G4H
ALWYSNRWV

SEQ ID NO: 66 - protein, 5 aa, Artificial Sequence
  CDR-H1 of G4H
RYAMN

SEQ ID NO: 67 - protein, 19 aa, Artificial Sequence
  CDR-H2 of G4H
RIRSKYNNYATYYADSVKG

SEQ ID NO: 68 - protein, 14 aa, Artificial Sequence
  CDR-H3 of G4H
HGNFGNSYLSYFAY

SEQ ID NO: 69 - protein, 125 aa, Artificial Sequence
  VH of G4H
EVQLVESGGGLVQPGGSLKLSCAASGFTFNRYAMNWVRQAPGKGLEWVARIRSKYNNYATYYADSVKGRFTISRDDSKNTAYLQMNNLKTEDTAVYYCVRHGNFGNSYLSYFAYWGQGTLVTVSS

SEQ ID NO: 70 - DNA, 375 bp, Artificial Sequence
  VH of G4H
gaggtgcagctggtcgagtctggaggaggattggtgcagcctggagggtcattgaaactctcatgtgcagcctctggattcaccttcaatcgctacgccatgaactgggtccgccaggctccaggaaagggtttggaatgggttgctcgcataagaagtaaatataataattatgcaacatattatgccgattcagtgaaagggaggttcaccatctccagagatgattcaaaaaacactgcctatctacaaatgaacaacttgaaaactgaggacactgccgtgtactactgtgtgagacatgggaacttcggtaatagctacttatcctacttcgcttactggggccaagggactctggtcaccgtctcctca

SEQ ID NO: 71 - protein, 109 aa, Artificial Sequence; identical to SEQ ID NO: 17
  VL of G4H

SEQ ID NO: 72 - DNA, 327 bp, Artificial Sequence; identical to SEQ ID NO: 18
  VL of G4H

SEQ ID NO: 73 - protein, 125 aa, Artificial Sequence
  VH-P of G4H
EVQLLESGGGLVQPGGSLKLSCAASGFTFNRYAMNWVRQAPGKGLEWVARIRSKYNNYATYYADSVKGRFTISRDDSKNTAYLQMNNLKTEDTAVYYCVRHGNFGNSYLSYFAYWGQGTLVTVSS

SEQ ID NO: 74 - DNA, 375 bp, Artificial Sequence
  VH-P of G4H
gaggtgcagctgctcgagtctggaggaggattggtgcagcctggagggtcattgaaactctcatgtgcagcctctggattcaccttcaatcgctacgccatgaactgggtccgccaggctccaggaaagggtttggaatgggttgctcgcataagaagtaaatataataattatgcaacatattatgccgattcagtgaaagggaggttcaccatctccagagatgattcaaaaaacactgcctatctacaaatgaacaacttgaaaactgaggacactgccgtgtactactgtgtgagacatgggaacttcggtaatagctacttatcctacttcgcttactggggccaagggactctggtcaccgtctcctca

SEQ ID NO: 75 - protein, 109 aa, Artificial Sequence; identical to SEQ ID NO: 21
  VL-P of G4H

SEQ ID NO: 76 - DNA, 327 bp, Artificial Sequence; identical to SEQ ID NO: 22
  VL-P of G4H

SEQ ID NO: 77 - protein, 249 aa, Artificial Sequence
  VH-VL of G4H
EVQLVESGGGLVQPGGSLKLSCAASGFTFNRYAMNWVRQAPGKGLEWVARIRSKYNNYATYYADSVKGRFTISRDDSKNTAYLQMNNLKTEDTAVYYCVRHGNFGNSYLSYFAYWGQGTLVTVSSGGGGSGGGGSGGGGSQTVVTQEPSLTVSPGGTVTLTCGSSTGAVTSGYYPNWVQQKPGQAPRGLIGGTKFLAPGTPARFSGSLLGGKAALTLSGVQPEDEAEYYCALWYSNRWVFGGGTKLTVL

SEQ ID NO: 78 - DNA, 747 bp, Artificial Sequence
  VH-VL of G4H
gaggtgcagctggtcgagtctggaggaggattggtgcagcctggagggtcattgaaactctcatgtgcagcctctggattcaccttcaatcgctacgccatgaactgggtccgccaggctccaggaaagggtttggaatgggttgctcgcataagaagtaaatataataattatgcaacatattatgccgattcagtgaaagggaggttcaccatctccagagatgattcaaaaaacactgcctatctacaaatgaacaacttgaaaactgaggacactgccgtgtactactgtgtgagacatgggaacttcggtaatagctacttatcctacttcgcttactggggccaagggactctggtcaccgtctcctcaggtggtggtggttctggcggcggcggctccggtggtggtggttctcagactgttgtgactcaggaaccttcactcaccgtatcacctggtggaacagtcacactcacttgtggctcctcgactggggctgttacatctggctactacccaaactgggtccaacaaaaaccaggtcaggcaccccgtggtctaataggtgggactaagttcctcgcccccggtactcctgccagattctcaggctccctgcttggaggcaaggctgccctcaccctctcaggggtacagccagaggatgaggcagaatattactgtgctctatggtacagcaaccgctgggtgttcggtggaggaaccaaactgactgtccta

SEQ ID NO: 79 - protein, 249 aa, Artificial Sequence
  VH-VL-P of G4H
EVQLLESGGGLVQPGGSLKLSCAASGFTFNRYAMNWVRQAPGKGLEWVARIRSKYNNYATYYADSVKGRFTISRDDSKNTAYLQMNNLKTEDTAVYYCVRHGNFGNSYLSYFAYWGQGTLVTVSSGGGGSGGGGSGGGGSELVVTQEPSLTVSPGGTVTLTCGSSTGAVTSGYYPNWVQQKPGQAPRGLIGGTKFLAPGTPARFSGSLLGGKAALTLSGVQPEDEAEYYCALWYSNRWVFGGGTKLTVL

SEQ ID NO: 80 - DNA, 747 bp, Artificial Sequence
  VH-VL-P of G4H
gaggtgcagctgctcgagtctggaggaggattggtgcagcctggagggtcattgaaactctcatgtgcagcctctggattcaccttcaatcgctacgccatgaactgggtccgccaggctccaggaaagggtttggaatgggttgctcgcataagaagtaaatataataattatgcaacatattatgccgattcagtgaaagggaggttcaccatctccagagatgattcaaaaaacactgcctatctacaaatgaacaacttgaaaactgaggacactgccgtgtactactgtgtgagacatgggaacttcggtaatagctacttatcctacttcgcttactggggccaagggactctggtcaccgtctcctcaggtggtggtggttctggcggcggcggctccggtggtggtggttctgagctcgttgtgactcaggaaccttcactcaccgtatcacctggtggaacagtcacactcacttgtggctcctcgactggggctgttacatctggctactacccaaactgggtccaacaaaaaccaggtcaggcaccccgtggtctaataggtgggactaagttcctcgcccccggtactcctgccagattctcaggctccctgcttggaggcaaggctgccctcaccctctcaggggtacagccagaggatgaggcagaatattactgtgctctatggtacagcaaccgctgggtgttcggtggaggaaccaaactgactgtccta

SEQ ID NO: 81 - protein, 14 aa, Artificial Sequence
  CDR-L1 of A2J
RSSTGAVTSGYYPN

SEQ ID NO: 82 - protein, 7 aa, Artificial Sequence
  CDR-L2 of A2J
ATDMRPS

SEQ ID NO: 83 - protein, 9 aa, Artificial Sequence
  CDR-L3 of A2J
ALWYSNRWV

SEQ ID NO: 84 - protein, 5 aa, Artificial Sequence
  CDR-H1 of A2J
VYAMN

SEQ ID NO: 85 - protein, 19 aa, Artificial Sequence
  CDR-H2 of A2J
RIRSKYNNYATYYADSVKK

SEQ ID NO: 86 - protein, 14 aa, Artificial Sequence
  CDR-H3 of A2J
HGNFGNSYLSWWAY

SEQ ID NO: 87 - protein, 125 aa, Artificial Sequence
  VH of A2J
EVQLVESGGGLVQPGGSLKLSCAASGFTFNVYAMNWVRQAPGKGLEWVARIRSKYNNYATYYADSVKKRFTISRDDSKNTAYLQMNNLKTEDTAVYYCVRHGNFGNSYLSWWAYWGQGTLVTVSS

SEQ ID NO: 88 - DNA, 375 bp, Artificial Sequence
  VH of A2J
gaggtgcagctggtcgagtctggaggaggattggtgcagcctggagggtcattgaaactctcatgtgcagcctctggattcaccttcaatgtctacgccatgaactgggtccgccaggctccaggaaagggtttggaatgggttgctcgcataagaagtaaatataataattatgcaacatattatgccgattcagtgaaaaagaggttcaccatctccagagatgattcaaaaaacactgcctatctacaaatgaacaacttgaaaactgaggacactgccgtgtactactgtgtgagacatgggaacttcggtaatagctacttatcctggtgggcttactggggccaagggactctggtcaccgtctcctca

SEQ ID NO: 89 - protein, 109 aa, Artificial Sequence
  VL of A2J
QTVVTQEPSLTVSPGGTVTLTCRSSTGAVTSGYYPNWVQQKPGQAPRGLIGATDMRPSGTPARFSGSLLGGKAALTLSGVQPEDEAEYYCALWYSNRWVFGGGTKLTVL

SEQ ID NO: 90 - DNA, 327 bp, Artificial Sequence
  VL of A2J
cagactgttgtgactcaggaaccttcactcaccgtatcacctggtggaacagtcacactcacttgtcgctcctcgactggggctgttacatctggctactacccaaactgggtccaacaaaaaccaggtcaggcaccccgtggtctaataggtgccactgacatgaggccctctggtactcctgccagattctcaggctccctgcttggaggcaaggctgccctcaccctctcaggggtacagccagaggatgaggcagaatattactgtgctctatggtacagcaaccgctgggtgttcggtggaggaaccaaactgactgtccta

SEQ ID NO: 91 - protein, 125 aa, Artificial Sequence
  VH-P of A2J
EVQLLESGGGLVQPGGSLKLSCAASGFTFNVYAMNWVRQAPGKGLEWVARIRSKYNNYATYYADSVKKRFTISRDDSKNTAYLQMNNLKTEDTAVYYCVRHGNFGNSYLSWWAYWGQGTLVTVSS

SEQ ID NO: 92 - DNA, 375 bp, Artificial Sequence
  VH-P of A2J
gaggtgcagctgctcgagtctggaggaggattggtgcagcctggagggtcattgaaactctcatgtgcagcctctggattcaccttcaatgtctacgccatgaactgggtccgccaggctccaggaaagggtttggaatgggttgctcgcataagaagtaaatataataattatgcaacatattatgccgattcagtgaaaaagaggttcaccatctccagagatgattcaaaaaacactgcctatctacaaatgaacaacttgaaaactgaggacactgccgtgtactactgtgtgagacatgggaacttcggtaatagctacttatcctggtgggcttactggggccaagggactctggtcaccgtctcctca

SEQ ID NO: 93 - protein, 109 aa, Artificial Sequence
  VL-P of A2J
ELVVTQEPSLTVSPGGTVTLTCRSSTGAVTSGYYPNWVQQKPGQAPRGLIGATDMRPSGTPARFSGSLLGGKAALTLSGVQPEDEAEYYCALWYSNRWVFGGGTKLTVL

SEQ ID NO: 94 - DNA, 327 bp, Artificial Sequence
  VL-P of A2J
gagctcgttgtgactcaggaaccttcactcaccgtatcacctggtggaacagtcacactcacttgtcgctcctcgactggggctgttacatctggctactacccaaactgggtccaacaaaaaccaggtcaggcaccccgtggtctaataggtgccactgacatgaggccctctggtactcctgccagattctcaggctccctgcttggaggcaaggctgccctcaccctctcaggggtacagccagaggatgaggcagaatattactgtgctctatggtacagcaaccgctgggtgttcggtggaggaaccaaactgactgtccta

SEQ ID NO: 95 - protein, 249 aa, Artificial Sequence
  VH-VL of A2J
EVQLVESGGGLVQPGGSLKLSCAASGFTFNVYAMNWVRQAPGKGLEWVARIRSKYNNYATYYADSVKKRFTISRDDSKNTAYLQMNNLKTEDTAVYYCVRHGNFGNSYLSWWAYWGQGTLVTVSSGGGGSGGGGSGGGGSQTVVTQEPSLTVSPGGTVTLTCRSSTGAVTSGYYPNWVQQKPGQAPRGLIGATDMRPSGTPARFSGSLLGGKAALTLSGVQPEDEAEYYCALWYSNRWVFGGGTKLTVL

SEQ ID NO: 96 - DNA, 747 bp, Artificial Sequence
  VH-VL of A2J
gaggtgcagctggtcgagtctggaggaggattggtgcagcctggagggtcattgaaactctcatgtgcagcctctggattcaccttcaatgtctacgccatgaactgggtccgccaggctccaggaaagggtttggaatgggttgctcgcataagaagtaaatataataattatgcaacatattatgccgattcagtgaaaaagaggttcaccatctccagagatgattcaaaaaacactgcctatctacaaatgaacaacttgaaaactgaggacactgccgtgtactactgtgtgagacatgggaacttcggtaatagctacttatcctggtgggcttactggggccaagggactctggtcaccgtctcctcaggtggtggtggttctggcggcggcggctccggtggtggtggttctcagactgttgtgactcaggaaccttcactcaccgtatcacctggtggaacagtcacactcacttgtcgctcctcgactggggctgttacatctggctactacccaaactgggtccaacaaaaaccaggtcaggcaccccgtggtctaataggtgccactgacatgaggccctctggtactcctgccagattctcaggctccctgcttggaggcaaggctgccctcaccctctcaggggtacagccagaggatgaggcagaatattactgtgctctatggtacagcaaccgctgggtgttcggtggaggaaccaaactgactgtccta

SEQ ID NO: 97 - protein, 249 aa, Artificial Sequence
  VH-VL-P of A2J
EVQLLESGGGLVQPGGSLKLSCAASGFTFNVYAMNWVRQAPGKGLEWVARIRSKYNNYATYYADSVKKRFTISRDDSKNTAYLQMNNLKTEDTAVYYCVRHGNFGNSYLSWWAYWGQGTLVTVSSGGGGSGGGGSGGGGSELVVTQEPSLTVSPGGTVTLTCRSSTGAVTSGYYPNWVQQKPGQAPRGLIGATDMRPSGTPARFSGSLLGGKAALTLSGVQPEDEAEYYCALWYSNRWVFGGGTKLTVL

SEQ ID NO: 98 - DNA, 747 bp, Artificial Sequence
  VH-VL-P of A2J
gaggtgcagctgctcgagtctggaggaggattggtgcagcctggagggtcattgaaactctcatgtgcagcctctggattcaccttcaatgtctacgccatgaactgggtccgccaggctccaggaaagggtttggaatgggttgctcgcataagaagtaaatataataattatgcaacatattatgccgattcagtgaaaaagaggttcaccatctccagagatgattcaaaaaacactgcctatctacaaatgaacaacttgaaaactgaggacactgccgtgtactactgtgtgagacatgggaacttcggtaatagctacttatcctggtgggcttactggggccaagggactctggtcaccgtctcctcaggtggtggtggttctggcggcggcggctccggtggtggtggttctgagctcgttgtgactcaggaaccttcactcaccgtatcacctggtggaacagtcacactcacttgtcgctcctcgactggggctgttacatctggctactacccaaactgggtccaacaaaaaccaggtcaggcaccccgtggtctaataggtgccactgacatgaggccctctggtactcctgccagattctcaggctccctgcttggaggcaaggctgccctcaccctctcaggggtacagccagaggatgaggcagaatattactgtgctctatggtacagcaaccgctgggtgttcggtggaggaaccaaactgactgtccta

SEQ ID NO: 99 - protein, 14 aa, Artificial Sequence
  CDR-L1 of E1L
GSSTGAVTSGYYPN

SEQ ID NO: 100 - protein, 7 aa, Artificial Sequence
  CDR-L2 of E1L
GTKFLAP

SEQ ID NO: 101 - protein, 9 aa, Artificial Sequence
  CDR-L3 of E1L
ALWYSNRWV

SEQ ID NO: 102 - protein, 5 aa, Artificial Sequence
  CDR-H1 of E1L
KYAMN

SEQ ID NO: 103 - protein, 19 aa, Artificial Sequence
  CDR-H2 of E1L
RIRSKYNNYATYYADSVKS

SEQ ID NO: 104 - protein, 14 aa, Artificial Sequence
  CDR-H3 of E1L
HGNFGNSYTSYYAY

SEQ ID NO: 105 - protein, 125 aa, Artificial Sequence
  VH of E1L
EVQLVESGGGLVQPGGSLKLSCAASGFTFNKYAMNWVRQAPGKGLEWVARIRSKYNNYATYYADSVKSRFTISRDDSKNTAYLQMNNLKTEDTAVYYCVRHGNFGNSYTSYYAYWGQGTLVTVSS

SEQ ID NO: 106 - DNA, 375 bp, Artificial Sequence
  VH of E1L
gaggtgcagctggtcgagtctggaggaggattggtgcagcctggagggtcattgaaactctcatgtgcagcctctggattcaccttcaataagtacgccatgaactgggtccgccaggctccaggaaagggtttggaatgggttgctcgcataagaagtaaatataataattatgcaacatattatgccgattcagtgaaatcgaggttcaccatctccagagatgattcaaaaaacactgcctatctacaaatgaacaacttgaaaactgaggacactgccgtgtactactgtgtgagacatgggaacttcggtaatagctacacatcctactacgcttactggggccaagggactctggtcaccgtctcctca

SEQ ID NO: 107 - protein, 109 aa, Artificial Sequence; identical to SEQ ID NO: 17
  VL of E1L

SEQ ID NO: 108 - DNA, 327 bp, Artificial Sequence; identical to SEQ ID NO: 18
  VL of E1L

SEQ ID NO: 109 - protein, 125 aa, Artificial Sequence
  VH-P of E1L
EVQLLESGGGLVQPGGSLKLSCAASGFTFNKYAMNWVRQAPGKGLEWVARIRSKYNNYATYYADSVKSRFTISRDDSKNTAYLQMNNLKTEDTAVYYCVRHGNFGNSYTSYYAYWGQGTLVTVSS

SEQ ID NO: 110 - DNA, 375 bp, Artificial Sequence
  VH-P of E1L
gaggtgcagctgctcgagtctggaggaggattggtgcagcctggagggtcattgaaactctcatgtgcagcctctggattcaccttcaataagtacgccatgaactgggtccgccaggctccaggaaagggtttggaatgggttgctcgcataagaagtaaatataataattatgcaacatattatgccgattcagtgaaatcgaggttcaccatctccagagatgattcaaaaaacactgcctatctacaaatgaacaacttgaaaactgaggacactgccgtgtactactgtgtgagacatgggaacttcggtaatagctacacatcctactacgcttactggggccaagggactctggtcaccgtctcctca

SEQ ID NO: 111 - protein, 109 aa, Artificial Sequence; identical to SEQ ID NO: 21
  VL-P of E1L

SEQ ID NO: 112 - DNA, 327 bp, Artificial Sequence; identical to SEQ ID NO: 22
  VL-P of E1L

SEQ ID NO: 113 - protein, 249 aa, Artificial Sequence
  VH-VL of E1L
EVQLVESGGGLVQPGGSLKLSCAASGFTFNKYAMNWVRQAPGKGLEWVARIRSKYNNYATYYADSVKSRFTISRDDSKNTAYLQMNNLKTEDTAVYYCVRHGNFGNSYTSYYAYWGQGTLVTVSSGGGGSGGGGSGGGGSQTVVTQEPSLTVSPGGTVTLTCGSSTGAVTSGYYPNWVQQKPGQAPRGLIGGTKFLAPGTPARFSGSLLGGKAALTLSGVQPEDEAEYYCALWYSNRWVFGGGTKLTVL

SEQ ID NO: 114 - DNA, 747 bp, Artificial Sequence
  VH-VL of E1L
gaggtgcagctggtcgagtctggaggaggattggtgcagcctggagggtcattgaaactctcatgtgcagcctctggattcaccttcaataagtacgccatgaactgggtccgccaggctccaggaaagggtttggaatgggttgctcgcataagaagtaaatataataattatgcaacatattatgccgattcagtgaaatcgaggttcaccatctccagagatgattcaaaaaacactgcctatctacaaatgaacaacttgaaaactgaggacactgccgtgtactactgtgtgagacatgggaacttcggtaatagctacacatcctactacgcttactggggccaagggactctggtcaccgtctcctcaggtggtggtggttctggcggcggcggctccggtggtggtggttctcagactgttgtgactcaggaaccttcactcaccgtatcacctggtggaacagtcacactcacttgtggctcctcgactggggctgttacatctggctactacccaaactgggtccaacaaaaaccaggtcaggcaccccgtggtctaataggtgggactaagttcctcgcccccggtactcctgccagattctcaggctccctgcttggaggcaaggctgccctcaccctctcaggggtacagccagaggatgaggcagaatattactgtgctctatggtacagcaaccgctgggtgttcggtggaggaaccaaactgactgtccta

SEQ ID NO: 115 - protein, 249 aa, Artificial Sequence
  VH-VL-P of E1L
EVQLLESGGGLVQPGGSLKLSCAASGFTFNKYAMNWVRQAPGKGLEWVARIRSKYNNYATYYADSVKSRFTISRDDSKNTAYLQMNNLKTEDTAVYYCVRHGNFGNSYTSYYAYWGQGTLVTVSSGGGGSGGGGSGGGGSELVVTQEPSLTVSPGGTVTLTCGSSTGAVTSGYYPNWVQQKPGQAPRGLIGGTKFLAPGTPARFSGSLLGGKAALTLSGVQPEDEAEYYCALWYSNRWVFGGGTKLTVL

SEQ ID NO: 116 - DNA, 747 bp, Artificial Sequence
  VH-VL-P of E1L
gaggtgcagctgctcgagtctggaggaggattggtgcagcctggagggtcattgaaactctcatgtgcagcctctggattcaccttcaataagtacgccatgaactgggtccgccaggctccaggaaagggtttggaatgggttgctcgcataagaagtaaatataataattatgcaacatattatgccgattcagtgaaatcgaggttcaccatctccagagatgattcaaaaaacactgcctatctacaaatgaacaacttgaaaactgaggacactgccgtgtactactgtgtgagacatgggaacttcggtaatagctacacatcctactacgcttactggggccaagggactctggtcaccgtctcctcaggtggtggtggttctggcggcggcggctccggtggtggtggttctgagctcgttgtgactcaggaaccttcactcaccgtatcacctggtggaacagtcacactcacttgtggctcctcgactggggctgttacatctggctactacccaaactgggtccaacaaaaaccaggtcaggcaccccgtggtctaataggtgggactaagttcctcgcccccggtactcctgccagattctcaggctccctgcttggaggcaaggctgccctcaccctctcaggggtacagccagaggatgaggcagaatattactgtgctctatggtacagcaaccgctgggtgttcggtggaggaaccaaactgactgtccta

SEQ ID NO: 117 - protein, 14 aa, Artificial Sequence
  CDR-L1 of E2M
RSSTGAVTSGYYPN

SEQ ID NO: 118 - protein, 7 aa, Artificial Sequence
  CDR-L2 of E2M
ATDMRPS

SEQ ID NO: 119 - protein, 9 aa, Artificial Sequence
  CDR-L3 of E2M
ALWYSNRWV

SEQ ID NO: 120 - protein, 5 aa, Artificial Sequence
  CDR-H1 of E2M
GYAMN

SEQ ID NO: 121 - protein, 19 aa, Artificial Sequence
  CDR-H2 of E2M
RIRSKYNNYATYYADSVKE

SEQ ID NO: 122 - protein, 14 aa, Artificial Sequence
  CDR-H3 of E2M
HRNFGNSYLSWFAY

SEQ ID NO: 123 - protein, 125 aa, Artificial Sequence
  VH of E2M
EVQLVESGGGLVQPGGSLKLSCAASGFTFNGYAMNWVRQAPGKGLEWVARIRSKYNNYATYYADSVKERFTISRDDSKNTAYLQMNNLKTEDTAVYYCVRHRNFGNSYLSWFAYWGQGTLVTVSS

SEQ ID NO: 124 - DNA, 375 bp, Artificial Sequence
  VH of E2M
gaggtgcagctggtcgagtctggaggaggattggtgcagcctggagggtcattgaaactctcatgtgcagcctctggattcaccttcaatggctacgccatgaactgggtccgccaggctccaggaaagggtttggaatgggttgctcgcataagaagtaaatataataattatgcaacatattatgccgattcagtgaaagagaggttcaccatctccagagatgattcaaaaaacactgcctatctacaaatgaacaacttgaaaactgaggacactgccgtgtactactgtgtgagacataggaacttcggtaatagctacttatcctggttcgcttactggggccaagggactctggtcaccgtctcctca

SEQ ID NO: 125 - protein, 109 aa, Artificial Sequence; identical to SEQ ID NO: 89
  VL of E2M

SEQ ID NO: 126 - DNA, 327 bp, Artificial Sequence; identical to SEQ ID NO: 90
  VL of E2M

SEQ ID NO: 127 - protein, 125 aa, Artificial Sequence
  VH-P of E2M
EVQLLESGGGLVQPGGSLKLSCAASGFTFNGYAMNWVRQAPGKGLEWVARIRSKYNNYATYYADSVKERFTISRDDSKNTAYLQMNNLKTEDTAVYYCVRHRNFGNSYLSWFAYWGQGTLVTVSS

SEQ ID NO: 128 - DNA, 375 bp, Artificial Sequence
  VH-P of E2M
gaggtgcagctgctcgagtctggaggaggattggtgcagcctggagggtcattgaaactctcatgtgcagcctctggattcaccttcaatggctacgccatgaactgggtccgccaggctccaggaaagggtttggaatgggttgctcgcataagaagtaaatataataattatgcaacatattatgccgattcagtgaaagagaggttcaccatctccagagatgattcaaaaaacactgcctatctacaaatgaacaacttgaaaactgaggacactgccgtgtactactgtgtgagacataggaacttcggtaatagctacttatcctggttcgcttactggggccaagggactctggtcaccgtctcctca

SEQ ID NO: 129 - protein, 109 aa, Artificial Sequence; identical to SEQ ID NO: 93
  VL-P of E2M

SEQ ID NO: 130 - DNA, 327 bp, Artificial Sequence; identical to SEQ ID NO: 94
  VL-P of E2M

SEQ ID NO: 131 - protein, 249 aa, Artificial Sequence
  VH-VL of E2M
EVQLVESGGGLVQPGGSLKLSCAASGFTFNGYAMNWVRQAPGKGLEWVARIRSKYNNYATYYADSVKERFTISRDDSKNTAYLQMNNLKTEDTAVYYCVRHRNFGNSYLSWFAYWGQGTLVTVSSGGGGSGGGGSGGGGSQTVVTQEPSLTVSPGGTVTLTCRSSTGAVTSGYYPNWVQQKPGQAPRGLIGATDMRPSGTPARFSGSLLGGKAALTLSGVQPEDEAEYYCALWYSNRWVFGGGTKLTVL

SEQ ID NO: 132 - DNA, 747 bp, Artificial Sequence
  VH-VL of E2M
gaggtgcagctggtcgagtctggaggaggattggtgcagcctggagggtcattgaaactctcatgtgcagcctctggattcaccttcaatggctacgccatgaactgggtccgccaggctccaggaaagggtttggaatgggttgctcgcataagaagtaaatataataattatgcaacatattatgccgattcagtgaaagagaggttcaccatctccagagatgattcaaaaaacactgcctatctacaaatgaacaacttgaaaactgaggacactgccgtgtactactgtgtgagacataggaacttcggtaatagctacttatcctggttcgcttactggggccaagggactctggtcaccgtctcctcaggtggtggtggttctggcggcggcggctccggtggtggtggttctcagactgttgtgactcaggaaccttcactcaccgtatcacctggtggaacagtcacactcacttgtcgctcctcgactggggctgttacatctggctactacccaaactgggtccaacaaaaaccaggtcaggcaccccgtggtctaataggtgccactgacatgaggccctctggtactcctgccagattctcaggctccctgcttggaggcaaggctgccctcaccctctcaggggtacagccagaggatgaggcagaatattactgtgctctatggtacagcaaccgctgggtgttcggtggaggaaccaaactgactgtccta

SEQ ID NO: 133 - protein, 249 aa, Artificial Sequence
  VH-VL-P of E2M
EVQLLESGGGLVQPGGSLKLSCAASGFTFNGYAMNWVRQAPGKGLEWVARIRSKYNNYATYYADSVKERFTISRDDSKNTAYLQMNNLKTEDTAVYYCVRHRNFGNSYLSWFAYWGQGTLVTVSSGGGGSGGGGSGGGGSELVVTQEPSLTVSPGGTVTLTCRSSTGAVTSGYYPNWVQQKPGQAPRGLIGATDMRPSGTPARFSGSLLGGKAALTLSGVQPEDEAEYYCALWYSNRWVFGGGTKLTVL

SEQ ID NO: 134 - DNA, 747 bp, Artificial Sequence
  VH-VL-P of E2M
gaggtgcagctgctcgagtctggaggaggattggtgcagcctggagggtcattgaaactctcatgtgcagcctctggattcaccttcaatggctacgccatgaactgggtccgccaggctccaggaaagggtttggaatgggttgctcgcataagaagtaaatataataattatgcaacatattatgccgattcagtgaaagagaggttcaccatctccagagatgattcaaaaaacactgcctatctacaaatgaacaacttgaaaactgaggacactgccgtgtactactgtgtgagacataggaacttcggtaatagctacttatcctggttcgcttactggggccaagggactctggtcaccgtctcctcaggtggtggtggttctggcggcggcggctccggtggtggtggttctgagctcgttgtgactcaggaaccttcactcaccgtatcacctggtggaacagtcacactcacttgtcgctcctcgactggggctgttacatctggctactacccaaactgggtccaacaaaaaccaggtcaggcaccccgtggtctaataggtgccactgacatgaggccctctggtactcctgccagattctcaggctccctgcttggaggcaaggctgccctcaccctctcaggggtacagccagaggatgaggcagaatattactgtgctctatggtacagcaaccgctgggtgttcggtggaggaaccaaactgactgtccta

SEQ ID NO: 135 - protein, 14 aa, Artificial Sequence
  CDR-L1 of F7O
GSSTGAVTSGYYPN

SEQ ID NO: 136 - protein, 7 aa, Artificial Sequence
  CDR-L2 of F7O
GTKFLAP

SEQ ID NO: 137 - protein, 9 aa, Artificial Sequence
  CDR-L3 of F7O
ALWYSNRWV

SEQ ID NO: 138 - protein, 5 aa, Artificial Sequence
  CDR-H1 of F7O
VYAMN

SEQ ID NO: 139 - protein, 19 aa, Artificial Sequence
  CDR-H2 of F7O
RIRSKYNNYATYYADSVKK

SEQ ID NO: 140 - protein, 14 aa, Artificial Sequence
  CDR-H3 of F7O
HGNFGNSYISWWAY

SEQ ID NO: 141 - protein, 125 aa, Artificial Sequence
  VH of F7O
EVQLVESGGGLVQPGGSLKLSCAASGFTFNVYAMNWVRQAPGKGLEWVARIRSKYNNYATYYADSVKKRFTISRDDSKNTAYLQMNNLKTEDTAVYYCVRHGNFGNSYISWWAYWGQGTLVTVSS

SEQ ID NO: 142 - DNA, 375 bp, Artificial Sequence
  VH of F7O
gaggtgcagctggtcgagtctggaggaggattggtgcagcctggagggtcattgaaactctcatgtgcagcctctggattcaccttcaatgtgtacgccatgaactgggtccgccaggctccaggaaagggtttggaatgggttgctcgcataagaagtaaatataataattatgcaacatattatgccgattcagtgaaaaagaggttcaccatctccagagatgattcaaaaaacactgcctatctacaaatgaacaacttgaaaactgaggacactgccgtgtactactgtgtgagacatgggaacttcggtaatagctacatatcctggtgggcttactggggccaagggactctggtcaccgtctcctca

SEQ ID NO: 143 - protein, 109 aa, Artificial Sequence; identical to SEQ ID NO: 17
  VL of F7O

SEQ ID NO: 144 - DNA, 327 bp, Artificial Sequence; identical to SEQ ID NO: 18
  VL of F7O

SEQ ID NO: 145 - protein, 125 aa, Artificial Sequence
  VH-P of F7O
EVQLLESGGGLVQPGGSLKLSCAASGFTFNVYAMNWVRQAPGKGLEWVARIRSKYNNYATYYADSVKKRFTISRDDSKNTAYLQMNNLKTEDTAVYYCVRHGNFGNSYISWWAYWGQGTLVTVSS

SEQ ID NO: 146 - DNA, 375 bp, Artificial Sequence
  VH-P of F7O
gaggtgcagctgctcgagtctggaggaggattggtgcagcctggagggtcattgaaactctcatgtgcagcctctggattcaccttcaatgtgtacgccatgaactgggtccgccaggctccaggaaagggtttggaatgggttgctcgcataagaagtaaatataataattatgcaacatattatgccgattcagtgaaaaagaggttcaccatctccagagatgattcaaaaaacactgcctatctacaaatgaacaacttgaaaactgaggacactgccgtgtactactgtgtgagacatgggaacttcggtaatagctacatatcctggtgggcttactggggccaagggactctggtcaccgtctcctca

SEQ ID NO: 147 - protein, 109 aa, Artificial Sequence; identical to SEQ ID NO: 21
  VL-P of F7O

SEQ ID NO: 148 - DNA, 327 bp, Artificial Sequence; identical to SEQ ID NO: 22
  VL-P of F7O

SEQ ID NO: 149 - protein, 249 aa, Artificial Sequence
  VH-VL of F7O
EVQLVESGGGLVQPGGSLKLSCAASGFTFNVYAMNWVRQAPGKGLEWVARIRSKYNNYATYYADSVKKRFTISRDDSKNTAYLQMNNLKTEDTAVYYCVRHGNFGNSYISWWAYWGQGTLVTVSSGGGGSGGGGSGGGGSQTVVTQEPSLTVSPGGTVTLTCGSSTGAVTSGYYPNWVQQKPGQAPRGLIGGTKFLAPGTPARFSGSLLGGKAALTLSGVQPEDEAEYYCALWYSNRWVFGGGTKLTVL

SEQ ID NO: 150 - DNA, 747 bp, Artificial Sequence
  VH-VL of F7O
gaggtgcagctggtcgagtctggaggaggattggtgcagcctggagggtcattgaaactctcatgtgcagcctctggattcaccttcaatgtgtacgccatgaactgggtccgccaggctccaggaaagggtttggaatgggttgctcgcataagaagtaaatataataattatgcaacatattatgccgattcagtgaaaaagaggttcaccatctccagagatgattcaaaaaacactgcctatctacaaatgaacaacttgaaaactgaggacactgccgtgtactactgtgtgagacatgggaacttcggtaatagctacatatcctggtgggcttactggggccaagggactctggtcaccgtctcctcaggtggtggtggttctggcggcggcggctccggtggtggtggttctcagactgttgtgactcaggaaccttcactcaccgtatcacctggtggaacagtcacactcacttgtggctcctcgactggggctgttacatctggctactacccaaactgggtccaacaaaaaccaggtcaggcaccccgtggtctaataggtgggactaagttcctcgcccccggtactcctgccagattctcaggctccctgcttggaggcaaggctgccctcaccctctcaggggtacagccagaggatgaggcagaatattactgtgctctatggtacagcaaccgctgggtgttcggtggaggaaccaaactgactgtccta

SEQ ID NO: 151 - protein, 249 aa, Artificial Sequence
  VH-VL-P of F7O
EVQLLESGGGLVQPGGSLKLSCAASGFTFNVYAMNWVRQAPGKGLEWVARIRSKYNNYATYYADSVKKRFTISRDDSKNTAYLQMNNLKTEDTAVYYCVRHGNFGNSYISWWAYWGQGTLVTVSSGGGGSGGGGSGGGGSELVVTQEPSLTVSPGGTVTLTCGSSTGAVTSGYYPNWVQQKPGQAPRGLIGGTKFLAPGTPARFSGSLLGGKAALTLSGVQPEDEAEYYCALWYSNRWVFGGGTKLTVL

SEQ ID NO: 152 - DNA, 747 bp, Artificial Sequence
  VH-VL-P of F7O
gaggtgcagctgctcgagtctggaggaggattggtgcagcctggagggtcattgaaactctcatgtgcagcctctggattcaccttcaatgtgtacgccatgaactgggtccgccaggctccaggaaagggtttggaatgggttgctcgcataagaagtaaatataataattatgcaacatattatgccgattcagtgaaaaagaggttcaccatctccagagatgattcaaaaaacactgcctatctacaaatgaacaacttgaaaactgaggacactgccgtgtactactgtgtgagacatgggaacttcggtaatagctacatatcctggtgggcttactggggccaagggactctggtcaccgtctcctcaggtggtggtggttctggcggcggcggctccggtggtggtggttctgagctcgttgtgactcaggaaccttcactcaccgtatcacctggtggaacagtcacactcacttgtggctcctcgactggggctgttacatctggctactacccaaactgggtccaacaaaaaccaggtcaggcaccccgtggtctaataggtgggactaagttcctcgcccccggtactcctgccagattctcaggctccctgcttggaggcaaggctgccctcaccctctcaggggtacagccagaggatgaggcagaatattactgtgctctatggtacagcaaccgctgggtgttcggtggaggaaccaaactgactgtccta

SEQ ID NO: 153 - protein, 14 aa, Artificial Sequence
  CDR-L1 of F12Q
GSSTGAVTSGNYPN

SEQ ID NO: 154 - protein, 7 aa, Artificial Sequence
  CDR-L2 of F12Q
GTKFLAP

SEQ ID NO: 155 - protein, 9 aa, Artificial Sequence
  CDR-L3 of F12Q
VLWYSNRWV

SEQ ID NO: 156 - protein, 5 aa, Artificial Sequence
  CDR-H1 of F12Q
SYAMN

SEQ ID NO: 157 - protein, 19 aa, Artificial Sequence
  CDR-H2 of F12Q
RIRSKYNNYATYYADSVKG

SEQ ID NO: 158 - protein, 14 aa, Artificial Sequence
  CDR-H3 of F12Q
HGNFGNSYVSWWAY

SEQ ID NO: 159 - protein, 125 aa, Artificial Sequence
  VH of F12Q
EVQLVESGGGLVQPGGSLKLSCAASGFTFNSYAMNWVRQAPGKGLEWVARIRSKYNNYATYYADSVKGRFTISRDDSKNTAYLQMNNLKTEDTAVYYCVRHGNFGNSYVSWWAYWGQGTLVTVSS

SEQ ID NO: 160 - DNA, 375 bp, Artificial Sequence
  VH of F12Q
gaggtgcagctggtcgagtctggaggaggattggtgcagcctggagggtcattgaaactctcatgtgcagcctctggattcaccttcaatagctacgccatgaactgggtccgccaggctccaggaaagggtttggaatgggttgctcgcataagaagtaaatataataattatgcaacatattatgccgattcagtgaaaggcaggttcaccatctccagagatgattcaaaaaacactgcctatctacaaatgaacaacttgaaaactgaggacactgccgtgtactactgtgtgagacatgggaacttcggtaatagctacgtttcctggtgggcttactggggccaagggactctggtcaccgtctcctca

SEQ ID NO: 161 - protein, 109 aa, Artificial Sequence
  VL of F12Q
QTVVTQEPSLTVSPGGTVTLTCGSSTGAVTSGNYPNWVQQKPGQAPRGLIGGTKFLAPGTPARFSGSLLGGKAALTLSGVQPEDEAEYYCVLWYSNRWVFGGGTKLTVL

SEQ ID NO: 162 - DNA, 327 bp, Artificial Sequence
  VL of F12Q
cagactgttgtgactcaggaaccttcactcaccgtatcacctggtggaacagtcacactcacttgtggctcctcgactggggctgttacatctggcaactacccaaactgggtccaacaaaaaccaggtcaggcaccccgtggtctaataggtgggactaagttcctcgcccccggtactcctgccagattctcaggctccctgcttggaggcaaggctgccctcaccctctcaggggtacagccagaggatgaggcagaatattactgtgttctatggtacagcaaccgctgggtgttcggtggaggaaccaaactgactgtccta

SEQ ID NO: 163 - protein, 125 aa, Artificial Sequence
  VH-P of F12Q
EVQLLESGGGLVQPGGSLKLSCAASGFTFNSYAMNWVRQAPGKGLEWVARIRSKYNNYATYYADSVKGRFTISRDDSKNTAYLQMNNLKTEDTAVYYCVRHGNFGNSYVSWWAYWGQGTLVTVSS

SEQ ID NO: 164 - DNA, 375 bp, Artificial Sequence
  VH-P of F12Q
gaggtgcagctgctcgagtctggaggaggattggtgcagcctggagggtcattgaaactctcatgtgcagcctctggattcaccttcaatagctacgccatgaactgggtccgccaggctccaggaaagggtttggaatgggttgctcgcataagaagtaaatataataattatgcaacatattatgccgattcagtgaaaggcaggttcaccatctccagagatgattcaaaaaacactgcctatctacaaatgaacaacttgaaaactgaggacactgccgtgtactactgtgtgagacatgggaacttcggtaatagctacgtttcctggtgggcttactggggccaagggactctggtcaccgtctcctca

SEQ ID NO: 165 - protein, 109 aa, Artificial Sequence
  VL-P of F12Q
ELVVTQEPSLTVSPGGTVTLTCGSSTGAVTSGNYPNWVQQKPGQAPRGLIGGTKFLAPGTPARFSGSLLGGKAALTLSGVQPEDEAEYYCVLWYSNRWVFGGGTKLTVL

SEQ ID NO: 166 - DNA, 327 bp, Artificial Sequence
  VL-P of F12Q
gagctcgttgtgactcaggaaccttcactcaccgtatcacctggtggaacagtcacactcacttgtggctcctcgactggggctgttacatctggcaactacccaaactgggtccaacaaaaaccaggtcaggcaccccgtggtctaataggtgggactaagttcctcgcccccggtactcctgccagattctcaggctccctgcttggaggcaaggctgccctcaccctctcaggggtacagccagaggatgaggcagaatattactgtgttctatggtacagcaaccgctgggtgttcggtggaggaaccaaactgactgtccta

SEQ ID NO: 167 - protein, 249 aa, Artificial Sequence
  VH-VL of F12Q
EVQLVESGGGLVQPGGSLKLSCAASGFTFNSYAMNWVRQAPGKGLEWVARIRSKYNNYATYYADSVKGRFTISRDDSKNTAYLQMNNLKTEDTAVYYCVRHGNFGNSYVSWWAYWGQGTLVTVSSGGGGSGGGGSGGGGSQTVVTQEPSLTVSPGGTVTLTCGSSTGAVTSGNYPNWVQQKPGQAPRGLIGGTKFLAPGTPARFSGSLLGGKAALTLSGVQPEDEAEYYCVLWYSNRWVFGGGTKLTVL

SEQ ID NO: 168 - DNA, 747 bp, Artificial Sequence
  VH-VL of F12Q
gaggtgcagctggtcgagtctggaggaggattggtgcagcctggagggtcattgaaactctcatgtgcagcctctggattcaccttcaatagctacgccatgaactgggtccgccaggctccaggaaagggtttggaatgggttgctcgcataagaagtaaatataataattatgcaacatattatgccgattcagtgaaaggcaggttcaccatctccagagatgattcaaaaaacactgcctatctacaaatgaacaacttgaaaactgaggacactgccgtgtactactgtgtgagacatgggaacttcggtaatagctacgtttcctggtgggcttactggggccaagggactctggtcaccgtctcctcaggtggtggtggttctggcggcggcggctccggtggtggtggttctcagactgttgtgactcaggaaccttcactcaccgtatcacctggtggaacagtcacactcacttgtggctcctcgactggggctgttacatctggcaactacccaaactgggtccaacaaaaaccaggtcaggcaccccgtggtctaataggtgggactaagttcctcgcccccggtactcctgccagattctcaggctccctgcttggaggcaaggctgccctcaccctctcaggggtacagccagaggatgaggcagaatattactgtgttctatggtacagcaaccgctgggtgttcggtggaggaaccaaactgactgtccta

SEQ ID NO: 169 - protein, 249 aa, Artificial Sequence
  VH-VL-P of F12Q
EVQLLESGGGLVQPGGSLKLSCAASGFTFNSYAMNWVRQAPGKGLEWVARIRSKYNNYATYYADSVKGRFTISRDDSKNTAYLQMNNLKTEDTAVYYCVRHGNFGNSYVSWWAYWGQGTLVTVSSGGGGSGGGGSGGGGSELVVTQEPSLTVSPGGTVTLTCGSSTGAVTSGNYPNWVQQKPGQAPRGLIGGTKFLAPGTPARFSGSLLGGKAALTLSGVQPEDEAEYYCVLWYSNRWVFGGGTKLTVL

SEQ ID NO: 170 - DNA, 747 bp, Artificial Sequence
  VH-VL-P of F12Q
gaggtgcagctgctcgagtctggaggaggattggtgcagcctggagggtcattgaaactctcatgtgcagcctctggattcaccttcaatagctacgccatgaactgggtccgccaggctccaggaaagggtttggaatgggttgctcgcataagaagtaaatataataattatgcaacatattatgccgattcagtgaaaggcaggttcaccatctccagagatgattcaaaaaacactgcctatctacaaatgaacaacttgaaaactgaggacactgccgtgtactactgtgtgagacatgggaacttcggtaatagctacgtttcctggtgggcttactggggccaagggactctggtcaccgtctcctcaggtggtggtggttctggcggcggcggctccggtggtggtggttctgagctcgttgtgactcaggaaccttcactcaccgtatcacctggtggaacagtcacactcacttgtggctcctcgactggggctgttacatctggcaactacccaaactgggtccaacaaaaaccaggtcaggcaccccgtggtctaataggtgggactaagttcctcgcccccggtactcctgccagattctcaggctccctgcttggaggcaaggctgccctcaccctctcaggggtacagccagaggatgaggcagaatattactgtgttctatggtacagcaaccgctgggtgttcggtggaggaaccaaactgactgtccta

SEQ ID NO: 171 - protein, 14 aa, Artificial Sequence
  CDR-L1 of I2C
GSSTGAVTSGNYPN

SEQ ID NO: 172 - protein, 7 aa, Artificial Sequence
  CDR-L2 of I2C
GTKFLAP

SEQ ID NO: 173 - protein, 9 aa, Artificial Sequence
  CDR-L3 of I2C
VLWYSNRWV

SEQ ID NO: 174 - protein, 5 aa, Artificial Sequence
  CDR-H1 of I2C
KYAMN

SEQ ID NO: 175 - protein, 19 aa, Artificial Sequence
  CDR-H2 of I2C
RIRSKYNNYATYYADSVKD

SEQ ID NO: 176 - protein, 14 aa, Artificial Sequence
  CDR-H3 of I2C
HGNFGNSYISYWAY

SEQ ID NO: 177 - protein, 125 aa, Artificial Sequence; identical to SEQ ID NO: 33
  VH of I2C

SEQ ID NO: 178 - DNA, 375 bp, Artificial Sequence; identical to SEQ ID NO: 34
  VH of I2C

SEQ ID NO: 179 - protein, 109 aa, Artificial Sequence; identical to SEQ ID NO: 161
  VL of I2C

SEQ ID NO: 180 - DNA, 327 bp, Artificial Sequence; identical to SEQ ID NO: 162
  VL of I2C

SEQ ID NO: 181 - protein, 125 aa, Artificial Sequence; identical to SEQ ID NO: 37
  VH-P of I2C

SEQ ID NO: 182 - DNA, 375 bp, Artificial Sequence; identical to SEQ ID NO: 38
  VH-P of I2C

SEQ ID NO: 183 - protein, 109 aa, Artificial Sequence; identical to SEQ ID NO: 165
  VL-P of I2C

SEQ ID NO: 184 - DNA, 327 bp, Artificial Sequence; identical to SEQ ID NO: 166
  VL-P of I2C

SEQ ID NO: 185 - protein, 249 aa, Artificial Sequence
  VH-VL of I2C
EVQLVESGGGLVQPGGSLKLSCAASGFTFNKYAMNWVRQAPGKGLEWVARIRSKYNNYATYYADSVKDRFTISRDDSKNTAYLQMNNLKTEDTAVYYCVRHGNFGNSYISYWAYWGQGTLVTVSSGGGGSGGGGSGGGGSQTVVTQEPSLTVSPGGTVTLTCGSSTGAVTSGNYPNWVQQKPGQAPRGLIGGTKFLAPGTPARFSGSLLGGKAALTLSGVQPEDEAEYYCVLWYSNRWVFGGGTKLTVL

SEQ ID NO: 186 - DNA, 747 bp, Artificial Sequence
  VH-VL of I2C
gaggtgcagctggtcgagtctggaggaggattggtgcagcctggagggtcattgaaactctcatgtgcagcctctggattcaccttcaataagtacgccatgaactgggtccgccaggctccaggaaagggtttggaatgggttgctcgcataagaagtaaatataataattatgcaacatattatgccgattcagtgaaagacaggttcaccatctccagagatgattcaaaaaacactgcctatctacaaatgaacaacttgaaaactgaggacactgccgtgtactactgtgtgagacatgggaacttcggtaatagctacatatcctactgggcttactggggccaagggactctggtcaccgtctcctcaggtggtggtggttctggcggcggcggctccggtggtggtggttctcagactgttgtgactcaggaaccttcactcaccgtatcacctggtggaacagtcacactcacttgtggctcctcgactggggctgttacatctggcaactacccaaactgggtccaacaaaaaccaggtcaggcaccccgtggtctaataggtgggactaagttcctcgcccccggtactcctgccagattctcaggctccctgcttggaggcaaggctgccctcaccctctcaggggtacagccagaggatgaggcagaatattactgtgttctatggtacagcaaccgctgggtgttcggtggaggaaccaaactgactgtccta

SEQ ID NO: 187 - protein, 249 aa, Artificial Sequence
  VH-VL-P of I2C
EVQLLESGGGLVQPGGSLKLSCAASGFTFNKYAMNWVRQAPGKGLEWVARIRSKYNNYATYYADSVKDRFTISRDDSKNTAYLQMNNLKTEDTAVYYCVRHGNFGNSYISYWAYWGQGTLVTVSSGGGGSGGGGSGGGGSELVVTQEPSLTVSPGGTVTLTCGSSTGAVTSGNYPNWVQQKPGQAPRGLIGGTKFLAPGTPARFSGSLLGGKAALTLSGVQPEDEAEYYCVLWYSNRWVFGGGTKLTVL

SEQ ID NO: 188 - DNA, 747 bp, Artificial Sequence
  VH-VL-P of I2C
gaggtgcagctgctcgagtctggaggaggattggtgcagcctggagggtcattgaaactctcatgtgcagcctctggattcaccttcaataagtacgccatgaactgggtccgccaggctccaggaaagggtttggaatgggttgctcgcataagaagtaaatataataattatgcaacatattatgccgattcagtgaaagacaggttcaccatctccagagatgattcaaaaaacactgcctatctacaaatgaacaacttgaaaactgaggacactgccgtgtactactgtgtgagacatgggaacttcggtaatagctacatatcctactgggcttactggggccaagggactctggtcaccgtctcctcaggtggtggtggttctggcggcggcggctccggtggtggtggttctgagctcgttgtgactcaggaaccttcactcaccgtatcacctggtggaacagtcacactcacttgtggctcctcgactggggctgttacatctggcaactacccaaactgggtccaacaaaaaccaggtcaggcaccccgtggtctaataggtgggactaagttcctcgcccccggtactcctgccagattctcaggctccctgcttggaggcaaggctgccctcaccctctcaggggtacagccagaggatgaggcagaatattactgtgttctatggtacagcaaccgctgggtgttcggtggaggaaccaaactgactgtccta

SEQ ID NO: 189 - protein, 15 aa, Artificial Sequence
  CDR-L1 of EGF-R 21-63
RASQSVSSSTYSYIH

SEQ ID NO: 190 - protein, 7 aa, Artificial Sequence
  CDR-L2 of EGF-R 21-63
YASNLES

SEQ ID NO: 191 - protein, 9 aa, Artificial Sequence
  CDR-L3 of EGF-R 21-63
QHSWEIPFT

SEQ ID NO: 192 - protein, 5 aa, Artificial Sequence
  CDR-H1 of EGF-R 21-63
DCVII

SEQ ID NO: 193 - protein, 17 aa, Artificial Sequence
  CDR-H2 of EGF-R 21-63
QIYPGTGRSYYNEIFKG

SEQ ID NO: 194 - protein, 11 aa, Artificial Sequence
  CDR-H3 of EGF-R 21-63
STLIHGTWFSY

SEQ ID NO: 195 - protein, 120 aa, Artificial Sequence
  VH of EGF-R 21-63
QVQLQQSGPDLVKPGASVKMSCKASGHTFTDCVIIWVKQRAGQGLEWIGQIYPGTGRSYYNEIFKGKATLTADKSSNTVHIQLSSLTSEDSAVYFCALSTLIHGTWFSYWGQGTLVTVSS

SEQ ID NO: 196 - DNA, 360 bp, Artificial Sequence
  VH of EGF-R 21-63
caggttcagctgcagcagtctggacctgatctggtgaagcctggggcctcagtgaagatgtcctgcaaggcttctggacacactttcactgactgtgttataatctgggtgaaacagagagctggacagggccttgagtggattggacagatttatccagggactggtcgttcttactacaatgagattttcaagggcaaggccacactgactgcagacaaatcctccaacacagtccacattcaactcagcagcctgacatctgaggactctgcggtctatttctgtgccctatctactcttattcacgggacctggttttcttattggggccaagggactctggtcactgtctcttcc

SEQ ID NO: 197 - protein, 111 aa, Artificial Sequence
  VL of EGF-R 21-63
DIVLTQSPASLPVSLGQRATISCRASQSVSSSTYSYIHWYQQKPGQPPKLLITYASNLESGVPARFSGSGSGTDFTLDIHPVEEDDSSTYYCQHSWEIPFTFGSGTKLEIK

SEQ ID NO: 198 - DNA, 333 bp, Artificial Sequence
  VL of EGF-R 21-63
gacattgtgctgacacagtctcctgcttccttacctgtgtctctggggcagagggccaccatctcatgcagggccagccaaagtgtcagttcatctacttatagttatatacactggtaccaacagaaaccaggacagccacccaaactcctcatcacgtatgcatccaacctagaatctggggtccctgccaggttcagtggcagtgggtctgggacagacttcaccctcgacatccatcctgtggaggaggatgattcttcaacatattactgtcagcacagttgggagattccatttacgttcggctcggggacaaagttggaaataaaa

SEQ ID NO: 199 - protein, 246 aa, Artificial Sequence
  VL-VH of EGF-R 21-63
DIVLTQSPASLPVSLGQRATISCRASQSVSSSTYSYIHWYQQKPGQPPKLLITYASNLESGVPARFSGSGSGTDFTLDIHPVEEDDSSTYYCQHSWEIPFTFGSGTKLEIKGGGGSGGGGSGGGGSQVQLQQSGPDLVKPGASVKMSCKASGHTFTDCVIIWVKQRAGQGLEWIGQIYPGTGRSYYNEIFKGKATLTADKSSNTVHIQLSSLTSEDSAVYFCALSTLIHGTWFSYWGQGTLVTVSS

SEQ ID NO: 200 - DNA, 738 bp, Artificial Sequence
  VL-VH of EGF-R 21-63
gacattgtgctgacacagtctcctgcttccttacctgtgtctctggggcagagggccaccatctcatgcagggccagccaaagtgtcagttcatctacttatagttatatacactggtaccaacagaaaccaggacagccacccaaactcctcatcacgtatgcatccaacctagaatctggggtccctgccaggttcagtggcagtgggtctgggacagacttcaccctcgacatccatcctgtggaggaggatgattcttcaacatattactgtcagcacagttgggagattccatttacgttcggctcggggacaaagttggaaataaaaggtggtggtggttctggcggcggcggctccggtggtggtggttctcaggttcagctgcagcagtctggacctgatctggtgaagcctggggcctcagtgaagatgtcctgcaaggcttctggacacactttcactgactgtgttataatctgggtgaaacagagagctggacagggccttgagtggattggacagatttatccagggactggtcgttcttactacaatgagattttcaagggcaaggccacactgactgcagacaaatcctccaacacagtccacattcaactcagcagcctgacatctgaggactctgcggtctatttctgtgccctatctactcttattcacgggacctggttttcttattggggccaagggactctggtcactgtctcttcc

SEQ ID NO: 201 - protein, 17 aa, Artificial Sequence
  CDR-L1 of MCSP-G4
KSSQSVLNSSNNRNYLA

SEQ ID NO: 202 - protein, 7 aa, Artificial Sequence
  CDR-L2 of MCSP-G4
WASTRES

SEQ ID NO: 203 - protein, 9 aa, Artificial Sequence
  CDR-L3 of MCSP-G4
QQHYSTPFT

SEQ ID NO: 204 - protein, 5 aa, Artificial Sequence
  CDR-H1 of MCSP-G4
NYYIH

SEQ ID NO: 205 - protein, 17 aa, Artificial Sequence
  CDR-H2 of MCSP-G4
WINPNSGATNYAQKFQG

SEQ ID NO: 206 - protein, 8 aa, Artificial Sequence
  CDR-H3 of MCSP-G4
SWVSWFAS

SEQ ID NO: 207 - protein, 117 aa, Artificial Sequence
  VH of MCSP-G4
QVQLVQSGAEVKRPGASMKVSCKASGYTFTNYYIHWVRQAPGQGLEWMGWINPNSGATNYAQKFQGRVTMTRDTSTSTVYMELSSLRSEDTAVYYCAKSWVSWFASWGQGTLVTVSS

SEQ ID NO: 208 - DNA, 351 bp, Artificial Sequence
  VH of MCSP-G4
caggtgcagctggtccagtctggggctgaggtgaagaggcctggggcctcaatgaaggtctcctgcaaggcttctgggtacaccttcaccaactactatatacactgggtgcgacaggcccctggacaaggtcttgagtggatgggttggatcaaccctaacagtggtgccacaaactatgcacagaagttccagggcagagtcaccatgaccagggacacgtccacgagcacagtctacatggagctgagcagcctgagatctgaggacacggccgtgtattactgtgcgaaatcctgggtctcctggtttgcttcctggggtcaaggaaccttggtcaccgtctcctca

SEQ ID NO: 209 - protein, 113 aa, Artificial Sequence
  VL of MCSP-G4
DIVMTQSPDSLAVSLGERATINCKSSQSVLNSSNNRNYLAWYQQKPGQPPKLLIYWASTRESGVPDRFSGSGSGTDFTLTISGLQAEDVAVYYCQQHYSTPFTFGPGTKVDIK

SEQ ID NO: 210 - DNA, 339 bp, Artificial Sequence
  VL of MCSP-G4
gatatcgtgatgacccagtctccagactccctggctgtgtctctgggcgagagggccaccatcaactgcaagtccagccagagtgttttaaacagctccaacaataggaactacttagcttggtaccagcagaaaccaggacagcctcctaagctgctcatttactgggcatctacccgggaatccggggtccctgaccgattcagtggcagcgggtctgggacagatttcactctcaccatcagtggcctgcaggctgaagatgtggcagtttattactgtcagcaacattatagtactccattcacttttggccctgggaccaaagtggatatcaaa

SEQ ID NO: 211 - protein, 117 aa, Artificial Sequence
  VH-P of MCSP-G4
EVQLLESGAEVKRPGASMKVSCKASGYTFTNYYIHWVRQAPGQGLEWMGWINPNSGATNYAQKFQGRVTMTRDTSTSTVYMELSSLRSEDTAVYYCAKSWVSWFASWGQGTLVTVSS

SEQ ID NO: 212 - DNA, 351 bp, Artificial Sequence
  VH-P of MCSP-G4
gaggtgcagctgctcgagtctggggctgaggtgaagaggcctggggcctcaatgaaggtctcctgcaaggcttctgggtacaccttcaccaactactatatacactgggtgcgacaggcccctggacaaggtcttgagtggatgggttggatcaaccctaacagtggtgccacaaactatgcacagaagttccagggcagagtcaccatgaccagggacacgtccacgagcacagtctacatggagctgagcagcctgagatctgaggacacggccgtgtattactgtgcgaaatcctgggtctcctggtttgcttcctggggtcaaggaaccttggtcaccgtctcctca

SEQ ID NO: 213 - protein, 113 aa, Artificial Sequence
  VL-P of MCSP-G4
ELVMTQSPDSLAVSLGERATINCKSSQSVLNSSNNRNYLAWYQQKPGQPPKLLIYWASTRESGVPDRFSGSGSGTDFTLTISGLQAEDVAVYYCQQHYSTPFTFGPGTKVDIK

SEQ ID NO: 214 - DNA, 339 bp, Artificial Sequence
  VL-P of MCSP-G4
gagctcgtgatgacccagtctccagactccctggctgtgtctctgggcgagagggccaccatcaactgcaagtccagccagagtgttttaaacagctccaacaataggaactacttagcttggtaccagcagaaaccaggacagcctcctaagctgctcatttactgggcatctacccgggaatccggggtccctgaccgattcagtggcagcgggtctgggacagatttcactctcaccatcagtggcctgcaggctgaagatgtggcagtttattactgtcagcaacattatagtactccattcacttttggccctgggaccaaagtggatatcaaa

SEQ ID NO: 215 - protein, 245 aa, Artificial Sequence
  VH-VL of MCSP-G4
QVQLVQSGAEVKRPGASMKVSCKASGYTFTNYYIHWVRQAPGQGLEWMGWINPNSGATNYAQKFQGRVTMTRDTSTSTVYMELSSLRSEDTAVYYCAKSWVSWFASWGQGTLVTVSSGGGGSGGGGSGGGGSDIVMTQSPDSLAVSLGERATINCKSSQSVLNSSNNRNYLAWYQQKPGQPPKLLIYWASTRESGVPDRFSGSGSGTDFTLTISGLQAEDVAVYYCQQHYSTPFTFGPGTKVDIK

SEQ ID NO: 216 - DNA, 735 bp, Artificial Sequence
  VH-VL of MCSP-G4
caggtgcagctggtccagtctggggctgaggtgaagaggcctggggcctcaatgaaggtctcctgcaaggcttctgggtacaccttcaccaactactatatacactgggtgcgacaggcccctggacaaggtcttgagtggatgggttggatcaaccctaacagtggtgccacaaactatgcacagaagttccagggcagagtcaccatgaccagggacacgtccacgagcacagtctacatggagctgagcagcctgagatctgaggacacggccgtgtattactgtgcgaaatcctgggtctcctggtttgcttcctggggtcaaggaaccttggtcaccgtctcctcaggtggtggtggttctggcggcggcggctccggtggtggtggttctgatatcgtgatgacccagtctccagactccctggctgtgtctctgggcgagagggccaccatcaactgcaagtccagccagagtgttttaaacagctccaacaataggaactacttagcttggtaccagcagaaaccaggacagcctcctaagctgctcatttactgggcatctacccgggaatccggggtccctgaccgattcagtggcagcgggtctgggacagatttcactctcaccatcagtggcctgcaggctgaagatgtggcagtttattactgtcagcaacattatagtactccattcacttttggccctgggaccaaagtggatatcaaa

SEQ ID NO: 217 - protein, 245 aa, Artificial Sequence
  VH-VL-P of MCSP-G4
EVQLLESGAEVKRPGASMKVSCKASGYTFTNYYIHWVRQAPGQGLEWMGWINPNSGATNYAQKFQGRVTMTRDTSTSTVYMELSSLRSEDTAVYYCAKSWVSWFASWGQGTLVTVSSGGGGSGGGGSGGGGSELVMTQSPDSLAVSLGERATINCKSSQSVLNSSNNRNYLAWYQQKPGQPPKLLIYWASTRESGVPDRFSGSGSGTDFTLTISGLQAEDVAVYYCQQHYSTPFTFGPGTKVDIK

SEQ ID NO: 218 - DNA, 735 bp, Artificial Sequence
  VH-VL-P of MCSP-G4
gaggtgcagctgctcgagtctggggctgaggtgaagaggcctggggcctcaatgaaggtctcctgcaaggcttctgggtacaccttcaccaactactatatacactgggtgcgacaggcccctggacaaggtcttgagtggatgggttggatcaaccctaacagtggtgccacaaactatgcacagaagttccagggcagagtcaccatgaccagggacacgtccacgagcacagtctacatggagctgagcagcctgagatctgaggacacggccgtgtattactgtgcgaaatcctgggtctcctggtttgcttcctggggtcaaggaaccttggtcaccgtctcctcaggtggtggtggttctggcggcggcggctccggtggtggtggttctgagctcgtgatgacccagtctccagactccctggctgtgtctctgggcgagagggccaccatcaactgcaagtccagccagagtgttttaaacagctccaacaataggaactacttagcttggtaccagcagaaaccaggacagcctcctaagctgctcatttactgggcatctacccgggaatccggggtccctgaccgattcagtggcagcgggtctgggacagatttcactctcaccatcagtggcctgcaggctgaagatgtggcagtttattactgtcagcaacattatagtactccattcacttttggccctgggaccaaagtggatatcaaa

SEQ ID NO: 219 - protein, 17 aa, Artificial Sequence
  CDR-L1 of MCSP-D2
KSSQSVLNSSNNRNYLA

SEQ ID NO: 220 - protein, 7 aa, Artificial Sequence
  CDR-L2 of MCSP-D2
WASTRES

SEQ ID NO: 221 - protein, 9 aa, Artificial Sequence
  CDR-L3 of MCSP-D2
QQHYSTPFT

SEQ ID NO: 222 - protein, 5 aa, Artificial Sequence
  CDR-H1 of MCSP-D2
GYYMH

SEQ ID NO: 223 - protein, 17 aa, Artificial Sequence
  CDR-H2 of MCSP-D2
WINPNSGGTSYAQKFQG

SEQ ID NO: 224 - protein, 8 aa, Artificial Sequence
  CDR-H3 of MCSP-D2
SWVSWFAS

SEQ ID NO: 225 - protein, 117 aa, Artificial Sequence
  VH of MCSP-D2
QVQLVQSGAEVKKPGASVKVSCKASGYTFTGYYMHWVRQAPGQGLEWMGWINPNSGGTSYAQKFQGRVTMTRDTSTSTVYMELSNLRSDDTAVYYCAKSWVSWFASWGQGTLVTVSS

SEQ ID NO: 226 - DNA, 351 bp, Artificial Sequence
  VH of MCSP-D2
caggtgcagctggtccagtctggggctgaggtgaagaagcctggggcctcagtgaaggtctcctgcaaggcttctggatacaccttcaccggctactatatgcactgggtgcgacaggcccctggacaagggcttgagtggatgggatggatcaaccctaacagtggtggcacaagctacgcacagaagttccagggcagagtcaccatgactagggacacgtccacgagcacagtctacatggagctgagcaacctgagatctgacgacacggccgtgtattactgtgcgaaatcctgggtctcctggtttgcttcctggggtcaaggaaccttggtcaccgtctcctca

SEQ ID NO: 227 - protein, 113 aa, Artificial Sequence; identical to SEQ ID NO: 209
  VL of MCSP-D2

SEQ ID NO: 228 - DNA, 339 bp, Artificial Sequence; identical to SEQ ID NO: 210
  VL of MCSP-D2

SEQ ID NO: 229 - protein, 117 aa, Artificial Sequence
  VH-P of MCSP-D2
EVQLLESGAEVKKPGASVKVSCKASGYTFTGYYMHWVRQAPGQGLEWMGWINPNSGGTSYAQKFQGRVTMTRDTSTSTVYMELSNLRSDDTAVYYCAKSWVSWFASWGQGTLVTVSS

SEQ ID NO: 230 - DNA, 351 bp, Artificial Sequence
  VH-P of MCSP-D2
gaggtgcagctgctcgagtctggggctgaggtgaagaagcctggggcctcagtgaaggtctcctgcaaggcttctggatacaccttcaccggctactatatgcactgggtgcgacaggcccctggacaagggcttgagtggatgggatggatcaaccctaacagtggtggcacaagctacgcacagaagttccagggcagagtcaccatgactagggacacgtccacgagcacagtctacatggagctgagcaacctgagatctgacgacacggccgtgtattactgtgcgaaatcctgggtctcctggtttgcttcctggggtcaaggaaccttggtcaccgtctcctca

SEQ ID NO: 231 - protein, 113 aa, Artificial Sequence; identical to SEQ ID NO: 213
  VL-P of MCSP-D2

SEQ ID NO: 232 - DNA, 339 bp, Artificial Sequence; identical to SEQ ID NO: 214
  VL-P of MCSP-D2

SEQ ID NO: 233 - protein, 245 aa, Artificial Sequence
  VH-VL of MCSP-D2
QVQLVQSGAEVKKPGASVKVSCKASGYTFTGYYMHWVRQAPGQGLEWMGWINPNSGGTSYAQKFQGRVTMTRDTSTSTVYMELSNLRSDDTAVYYCAKSWVSWFASWGQGTLVTVSSGGGGSGGGGSGGGGSDIVMTQSPDSLAVSLGERATINCKSSQSVLNSSNNRNYLAWYQQKPGQPPKLLIYWASTRESGVPDRFSGSGSGTDFTLTISGLQAEDVAVYYCQQHYSTPFTFGPGTKVDIK

SEQ ID NO: 234 - DNA, 735 bp, Artificial Sequence
  VH-VL of MCSP-D2
caggtgcagctggtccagtctggggctgaggtgaagaagcctggggcctcagtgaaggtctcctgcaaggcttctggatacaccttcaccggctactatatgcactgggtgcgacaggcccctggacaagggcttgagtggatgggatggatcaaccctaacagtggtggcacaagctacgcacagaagttccagggcagagtcaccatgactagggacacgtccacgagcacagtctacatggagctgagcaacctgagatctgacgacacggccgtgtattactgtgcgaaatcctgggtctcctggtttgcttcctggggtcaaggaaccttggtcaccgtctcctcaggtggtggtggttctggcggcggcggctccggtggtggtggttctgatatcgtgatgacccagtctccagactccctggctgtgtctctgggcgagagggccaccatcaactgcaagtccagccagagtgttttaaacagctccaacaataggaactacttagcttggtaccagcagaaaccaggacagcctcctaagctgctcatttactgggcatctacccgggaatccggggtccctgaccgattcagtggcagcgggtctgggacagatttcactctcaccatcagtggcctgcaggctgaagatgtggcagtttattactgtcagcaacattatagtactccattcacttttggccctgggaccaaagtggatatcaaa

SEQ ID NO: 235 - protein, 245 aa, Artificial Sequence
  VH-VL-P of MCSP-D2
EVQLLESGAEVKKPGASVKVSCKASGYTFTGYYMHWVRQAPGQGLEWMGWINPNSGGTSYAQKFQGRVTMTRDTSTSTVYMELSNLRSDDTAVYYCAKSWVSWFASWGQGTLVTVSSGGGGSGGGGSGGGGSELVMTQSPDSLAVSLGERATINCKSSQSVLNSSNNRNYLAWYQQKPGQPPKLLIYWASTRESGVPDRFSGSGSGTDFTLTISGLQAEDVAVYYCQQHYSTPFTFGPGTKVDIK

SEQ ID NO: 236 - DNA, 735 bp, Artificial Sequence
  VH-VL-P of MCSP-D2
gaggtgcagctgctcgagtctggggctgaggtgaagaagcctggggcctcagtgaaggtctcctgcaaggcttctggatacaccttcaccggctactatatgcactgggtgcgacaggcccctggacaagggcttgagtggatgggatggatcaaccctaacagtggtggcacaagctacgcacagaagttccagggcagagtcaccatgactagggacacgtccacgagcacagtctacatggagctgagcaacctgagatctgacgacacggccgtgtattactgtgcgaaatcctgggtctcctggtttgcttcctggggtcaaggaaccttggtcaccgtctcctcaggtggtggtggttctggcggcggcggctccggtggtggtggttctgagctcgtgatgacccagtctccagactccctggctgtgtctctgggcgagagggccaccatcaactgcaagtccagccagagtgttttaaacagctccaacaataggaactacttagcttggtaccagcagaaaccaggacagcctcctaagctgctcatttactgggcatctacccgggaatccggggtccctgaccgattcagtggcagcgggtctgggacagatttcactctcaccatcagtggcctgcaggctgaagatgtggcagtttattactgtcagcaacattatagtactccattcacttttggccctgggaccaaagtggatatcaaa

SEQ ID NO: 237 - protein, 17 aa, Artificial Sequence
  CDR-L1 of MCSP-F9
KSSQSVLSSSNNKNYLN

SEQ ID NO: 238 - protein, 7 aa, Artificial Sequence
  CDR-L2 of MCSP-F9
WASTRES

SEQ ID NO: 239 - protein, 9 aa, Artificial Sequence
  CDR-L3 of MCSP-F9
QQHYSVPFT

SEQ ID NO: 240 - protein, 6 aa, Artificial Sequence
  CDR-H1 of MCSP-F9
SSNWWS

SEQ ID NO: 241 - protein, 16 aa, Artificial Sequence
  CDR-H2 of MCSP-F9
TIYYNGNTYYNPSLKS

SEQ ID NO: 242 - protein, 8 aa, Artificial Sequence
  CDR-H3 of MCSP-F9
SWVSWFAS

SEQ ID NO: 243 - protein, 117 aa, Artificial Sequence
  VH of MCSP-F9
QVQLQESGPGLVKPSETLSLTCVVSGGSISSSNWWSWVRQPPGKGLEWLGTIYYNGNTYYNPSLKSRVTISVDTSKNQFSLRLSSVTAADTAVYYCAKSWVSWFASWGQGTLVTVSS

SEQ ID NO: 244 - DNA, 351 bp, Artificial Sequence
  VH of MCSP-F9
caggtgcagctgcaagagtctggcccaggactggtgaagccttcggagaccctgtccctcacctgcgttgtctctggtggctccatcagcagtagtaactggtggagctgggtccgccagcccccagggaagggactggagtggcttgggactatctattataatgggaatacctactacaacccgtccctcaagagtcgagtcaccatctccgtagacacgtccaagaaccagttctccctgaggctgagctctgtgaccgccgcagacacggccgtgtattactgtgcgaaatcctgggtctcctggtttgcttcctggggtcaaggaaccttggtcaccgtctcctca

SEQ ID NO: 245 - protein, 113 aa, Artificial Sequence
  VL of MCSP-F9
DIVMTQSPDSLAVSLGERATINCKSSQSVLSSSNNKNYLNWYQQKPGQPPKLLIYWASTRESGVPDRFSGSGSGTDFTLTISSLQAEDVAVYYCQQHYSVPFTFGPGTKVDIK

SEQ ID NO: 246 - DNA, 339 bp, Artificial Sequence
  VL of MCSP-F9
gatatcgtgatgacacagtctccagactccctggctgtgtctctgggcgagagggccaccatcaactgcaagtccagccagagtgtcttatccagctccaacaataagaactacttaaattggtaccagcagaaaccaggacagcctcctaagttgctcatttactgggcatctacccgggaatccggggtccctgaccgattcagtggcagcgggtctgggacagatttcactctcaccatcagcagcctgcaggctgaagatgtggcagtttattactgtcagcaacattatagtgttccattcactttcggccctgggaccaaagtggatatcaaa

SEQ ID NO: 247 - protein, 117 aa, Artificial Sequence
  VH-P of MCSP-F9
EVQLLESGPGLVKPSETLSLTCVVSGGSISSSNWWSWVRQPPGKGLEWLGTIYYNGNTYYNPSLKSRVTISVDTSKNQFSLRLSSVTAADTAVYYCAKSWVSWFASWGQGTLVTVSS

SEQ ID NO: 248 - DNA, 351 bp, Artificial Sequence
  VH-P of MCSP-F9
gaggtgcagctgctcgagtctggcccaggactggtgaagccttcggagaccctgtccctcacctgcgttgtctctggtggctccatcagcagtagtaactggtggagctgggtccgccagcccccagggaagggactggagtggcttgggactatctattataatgggaatacctactacaacccgtccctcaagagtcgagtcaccatctccgtagacacgtccaagaaccagttctccctgaggctgagctctgtgaccgccgcagacacggccgtgtattactgtgcgaaatcctgggtctcctggtttgcttcctggggtcaaggaaccttggtcaccgtctcctca

SEQ ID NO: 249 - protein, 113 aa, Artificial Sequence
  VL-P of MCSP-F9
ELVMTQSPDSLAVSLGERATINCKSSQSVLSSSNNKNYLNWYQQKPGQPPKLLIYWASTRESGVPDRFSGSGSGTDFTLTISSLQAEDVAVYYCQQHYSVPFTFGPGTKVDIK

SEQ ID NO: 250 - DNA, 339 bp, Artificial Sequence
  VL-P of MCSP-F9
gagctcgtgatgacacagtctccagactccctggctgtgtctctgggcgagagggccaccatcaactgcaagtccagccagagtgtcttatccagctccaacaataagaactacttaaattggtaccagcagaaaccaggacagcctcctaagttgctcatttactgggcatctacccgggaatccggggtccctgaccgattcagtggcagcgggtctgggacagatttcactctcaccatcagcagcctgcaggctgaagatgtggcagtttattactgtcagcaacattatagtgttccattcactttcggccctgggaccaaagtggatatcaaa

SEQ ID NO: 251 - protein, 245 aa, Artificial Sequence
  VH-VL of MCSP-F9
QVQLQESGPGLVKPSETLSLTCVVSGGSISSSNWWSWVRQPPGKGLEWLGTIYYNGNTYYNPSLKSRVTISVDTSKNQFSLRLSSVTAADTAVYYCAKSWVSWFASWGQGTLVTVSSGGGGSGGGGSGGGGSDIVMTQSPDSLAVSLGERATINCKSSQSVLSSSNNKNYLNWYQQKPGQPPKLLIYWASTRESGVPDRFSGSGSGTDFTLTISSLQAEDVAVYYCQQHYSVPFTFGPGTKVDIK

SEQ ID NO: 252 - DNA, 735 bp, Artificial Sequence
  VH-VL of MCSP-F9
caggtgcagctgcaagagtctggcccaggactggtgaagccttcggagaccctgtccctcacctgcgttgtctctggtggctccatcagcagtagtaactggtggagctgggtccgccagcccccagggaagggactggagtggcttgggactatctattataatgggaatacctactacaacccgtccctcaagagtcgagtcaccatctccgtagacacgtccaagaaccagttctccctgaggctgagctctgtgaccgccgcagacacggccgtgtattactgtgcgaaatcctgggtctcctggtttgcttcctggggtcaaggaaccttggtcaccgtctcctcaggtggtggtggttctggcggcggcggctccggtggtggtggttctgatatcgtgatgacacagtctccagactccctggctgtgtctctgggcgagagggccaccatcaactgcaagtccagccagagtgtcttatccagctccaacaataagaactacttaaattggtaccagcagaaaccaggacagcctcctaagttgctcatttactgggcatctacccgggaatccggggtccctgaccgattcagtggcagcgggtctgggacagatttcactctcaccatcagcagcctgcaggctgaagatgtggcagtttattactgtcagcaacattatagtgttccattcactttcggccctgggaccaaagtggatatcaaa

SEQ ID NO: 253 - protein, 245 aa, Artificial Sequence
  VH-VL-P of MCSP-F9
EVQLLESGPGLVKPSETLSLTCVVSGGSISSSNWWSWVRQPPGKGLEWLGTIYYNGNTYYNPSLKSRVTISVDTSKNQFSLRLSSVTAADTAVYYCAKSWVSWFASWGQGTLVTVSSGGGGSGGGGSGGGGSELVMTQSPDSLAVSLGERATINCKSSQSVLSSSNNKNYLNWYQQKPGQPPKLLIYWASTRESGVPDRFSGSGSGTDFTLTISSLQAEDVAVYYCQQHYSVPFTFGPGTKVDIK

SEQ ID NO: 254 - DNA, 735 bp, Artificial Sequence
  VH-VL-P of MCSP-F9
gaggtgcagctgctcgagtctggcccaggactggtgaagccttcggagaccctgtccctcacctgcgttgtctctggtggctccatcagcagtagtaactggtggagctgggtccgccagcccccagggaagggactggagtggcttgggactatctattataatgggaatacctactacaacccgtccctcaagagtcgagtcaccatctccgtagacacgtccaagaaccagttctccctgaggctgagctctgtgaccgccgcagacacggccgtgtattactgtgcgaaatcctgggtctcctggtttgcttcctggggtcaaggaaccttggtcaccgtctcctcaggtggtggtggttctggcggcggcggctccggtggtggtggttctgagctcgtgatgacacagtctccagactccctggctgtgtctctgggcgagagggccaccatcaactgcaagtccagccagagtgtcttatccagctccaacaataagaactacttaaattggtaccagcagaaaccaggacagcctcctaagttgctcatttactgggcatctacccgggaatccggggtccctgaccgattcagtggcagcgggtctgggacagatttcactctcaccatcagcagcctgcaggctgaagatgtggcagtttattactgtcagcaacattatagtgttccattcactttcggccctgggaccaaagtggatatcaaa

SEQ ID NO: 255 - protein, 11 aa, Artificial Sequence
  CDR-L1 of IgE-D4
RASQSVSSNLA

SEQ ID NO: 256 - protein, 7 aa, Artificial Sequence
  CDR-L2 of IgE-D4
DASNRAT

SEQ ID NO: 257 - protein, 9 aa, Artificial Sequence
  CDR-L3 of IgE-D4
QQFGDTLWT

SEQ ID NO: 258 - protein, 5 aa, Artificial Sequence
  CDR-H1 of IgE-D4
SYAMS

SEQ ID NO: 259 - protein, 16 aa, Artificial Sequence
  CDR-H2 of IgE-D4
SISSGNIIYYPDNVKG

SEQ ID NO: 260 - protein, 10 aa, Artificial Sequence
  CDR-H3 of IgE-D4
GRSTYGGFDH

SEQ ID NO: 261 - protein, 118 aa, Artificial Sequence
  VH of IgE-D4
EVQLLESGGGLVQPGGSLRLSCAASGFTFSSYAMSWVRQAPGKGLEWVASISSGNIIYYPDNVKGRFTISRDNSKNTLYLQMNSLRAEDTAVYYCTRGRSTYGGFDHWGQGTTVTVSS

SEQ ID NO: 262 - DNA, 354 bp, Artificial Sequence
  VH of IgE-D4
gaggtgcagctgctcgagtctgggggaggccttgtgcagcctggagggtctctgaggctctcctgtgcagcctctggattcactttcagtagttatgccatgtcttgggttcgccaggctccagggaaggggctggagtgggtcgcttccattagtagtggtaatatcatctactatccagacaatgtgaagggccgattcaccatctctagagataattccaagaacaccctgtacctgcaaatgaacagtctgagggctgaggacacggccgtgtattattgtactagaggccgcagtacctacgggggatttgaccactggggccaaggcaccacagtcaccgtctcctca

SEQ ID NO: 263 - protein, 107 aa, Artificial Sequence
  VL of IgE-D4
EIVLTQSPATLSVSPGERATLSCRASQSVSSNLAWYQQKPGQAPRLLIYDASNRATGIPARFSGSGSGTDFTLTISSLEPEDFAVYYCQQFGDTLWTFGQGTKVEIK

SEQ ID NO: 264 - DNA, 321 bp, Artificial Sequence
  VL of IgE-D4
gagatcgtgttgacacagtctccagccaccctgtctgtgtctccaggggaaagagccaccctctcctgcagggccagtcagagtgttagcagcaacttagcctggtaccagcagaaacctggccaggctcccaggctcctcatctatgatgcatccaacagggccactggcatcccagccaggttcagtggcagtgggtctgggacagacttcactctcaccatcagcagcctagagcctgaagattttgcagtttattactgtcagcagttcggtgatacactgtggacgttcggccaagggaccaaggtggagatcaaa

SEQ ID NO: 265 - protein, 118 aa, Artificial Sequence; identical to SEQ ID NO: 261
  VH-P of IgE-D4

SEQ ID NO: 266 - DNA, 354 bp, Artificial Sequence; identical to SEQ ID NO: 262
  VH-P of IgE-D4

SEQ ID NO: 267 - protein, 107 aa, Artificial Sequence
  VL-P of IgE-D4
ELVLTQSPATLSVSPGERATLSCRASQSVSSNLAWYQQKPGQAPRLLIYDASNRATGIPARFSGSGSGTDFTLTISSLEPEDFAVYYCQQFGDTLWTFGQGTKVEIK

SEQ ID NO: 268 - DNA, 321 bp, Artificial Sequence
  VL-P of IgE-D4
gagctcgtgttgacacagtctccagccaccctgtctgtgtctccaggggaaagagccaccctctcctgcagggccagtcagagtgttagcagcaacttagcctggtaccagcagaaacctggccaggctcccaggctcctcatctatgatgcatccaacagggccactggcatcccagccaggttcagtggcagtgggtctgggacagacttcactctcaccatcagcagcctagagcctgaagattttgcagtttattactgtcagcagttcggtgatacactgtggacgttcggccaagggaccaaggtggagatcaaa

SEQ ID NO: 269 - protein, 240 aa, Artificial Sequence
  VH-VL of IgE-D4
EVQLLESGGGLVQPGGSLRLSCAASGFTFSSYAMSWVRQAPGKGLEWVASISSGNIIYYPDNVKGRFTISRDNSKNTLYLQMNSLRAEDTAVYYCTRGRSTYGGFDHWGQGTTVTVSSGGGGSGGGGSGGGGSEIVLTQSPATLSVSPGERATLSCRASQSVSSNLAWYQQKPGQAPRLLIYDASNRATGIPARFSGSGSGTDFTLTISSLEPEDFAVYYCQQFGDTLWTFGQGTKVEIK

SEQ ID NO: 270 - DNA, 720 bp, Artificial Sequence
  VH-VL of IgE-D4
gaggtgcagctgctcgagtctgggggaggccttgtgcagcctggagggtctctgaggctctcctgtgcagcctctggattcactttcagtagttatgccatgtcttgggttcgccaggctccagggaaggggctggagtgggtcgcttccattagtagtggtaatatcatctactatccagacaatgtgaagggccgattcaccatctctagagataattccaagaacaccctgtacctgcaaatgaacagtctgagggctgaggacacggccgtgtattattgtactagaggccgcagtacctacgggggatttgaccactggggccaaggcaccacagtcaccgtctcctcaggtggtggtggttctggcggcggcggctccggtggtggtggttctgagatcgtgttgacacagtctccagccaccctgtctgtgtctccaggggaaagagccaccctctcctgcagggccagtcagagtgttagcagcaacttagcctggtaccagcagaaacctggccaggctcccaggctcctcatctatgatgcatccaacagggccactggcatcccagccaggttcagtggcagtgggtctgggacagacttcactctcaccatcagcagcctagagcctgaagattttgcagtttattactgtcagcagttcggtgatacactgtggacgttcggccaagggaccaaggtggagatcaaa

SEQ ID NO: 271 - protein, 240 aa, Artificial Sequence
  VH-VL-P of IgE-D4
EVQLLESGGGLVQPGGSLRLSCAASGFTFSSYAMSWVRQAPGKGLEWVASISSGNIIYYPDNVKGRFTISRDNSKNTLYLQMNSLRAEDTAVYYCTRGRSTYGGFDHWGQGTTVTVSSGGGGSGGGGSGGGGSELVLTQSPATLSVSPGERATLSCRASQSVSSNLAWYQQKPGQAPRLLIYDASNRATGIPARFSGSGSGTDFTLTISSLEPEDFAVYYCQQFGDTLWTFGQGTKVEIK

SEQ ID NO: 272 - DNA, 720 bp, Artificial Sequence
  VH-VL-P of IgE-D4
gaggtgcagctgctcgagtctgggggaggccttgtgcagcctggagggtctctgaggctctcctgtgcagcctctggattcactttcagtagttatgccatgtcttgggttcgccaggctccagggaaggggctggagtgggtcgcttccattagtagtggtaatatcatctactatccagacaatgtgaagggccgattcaccatctctagagataattccaagaacaccctgtacctgcaaatgaacagtctgagggctgaggacacggccgtgtattattgtactagaggccgcagtacctacgggggatttgaccactggggccaaggcaccacagtcaccgtctcctcaggtggtggtggttctggcggcggcggctccggtggtggtggttctgagctcgtgttgacacagtctccagccaccctgtctgtgtctccaggggaaagagccaccctctcctgcagggccagtcagagtgttagcagcaacttagcctggtaccagcagaaacctggccaggctcccaggctcctcatctatgatgcatccaacagggccactggcatcccagccaggttcagtggcagtgggtctgggacagacttcactctcaccatcagcagcctagagcctgaagattttgcagtttattactgtcagcagttcggtgatacactgtggacgttcggccaagggaccaaggtggagatcaaa

SEQ ID NO: 273 - protein, 11 aa, Artificial Sequence
  CDR-L1 of IgE-G9
WASQGVSNNLA

SEQ ID NO: 274 - protein, 7 aa, Artificial Sequence
  CDR-L2 of IgE-G9
DAFNRAT

SEQ ID NO: 275 - protein, 9 aa, Artificial Sequence
  CDR-L3 of IgE-G9
QQFGDSLWT

SEQ ID NO: 276 - protein, 5 aa, Artificial Sequence
  CDR-H1 of IgE-G9
SYAMS

SEQ ID NO: 277 - protein, 16 aa, Artificial Sequence
  CDR-H2 of IgE-G9
SISSGNIIYYPDNVKG

SEQ ID NO: 278 - protein, 10 aa, Artificial Sequence
  CDR-H3 of IgE-G9
GRSTYGGFDH

SEQ ID NO: 279 - protein, 118 aa, Artificial Sequence; identical to SEQ ID NO: 261
  VH of IgE-G9

SEQ ID NO: 280 - DNA, 354 bp, Artificial Sequence; identical to SEQ ID NO: 262
  VH of IgE-G9

SEQ ID NO: 281 - protein, 107 aa, Artificial Sequence
  VL of IgE-G9
EIVMTQSPATLSVSPGERVTLSCWASQGVSNNLAWYQQRPGQAPRLLIYDAFNRATGIPARFSGSGSGTDFTLTISRLEPEDFAVYYCQQFGDSLWTFGQGTKLEIK

SEQ ID NO: 282 - DNA, 321 bp, Artificial Sequence
  VL of IgE-G9
gagatcgtgatgacacagtctccagccaccctgtctgtgtctccaggggaaagagtcaccctctcctgctgggccagtcagggtgtgagcaacaacttagcctggtaccagcagagacctggccaggctcccaggctcctcatctatgatgcattcaacagggccactggcatcccagccaggttcagtggcagtgggtctgggacagacttcactctcaccatcagcagactggagcctgaagattttgcggtgtattactgtcagcagtttggtgattcactttggacgttcggccaggggaccaagctggaaatcaaa

SEQ ID NO: 283 - protein, 118 aa, Artificial Sequence; identical to SEQ ID NO: 261
  VH-P of IgE-G9

SEQ ID NO: 284 - DNA, 354 bp, Artificial Sequence; identical to SEQ ID NO: 262
  VH-P of IgE-G9

SEQ ID NO: 285 - protein, 107 aa, Artificial Sequence
  VL-P of IgE-G9
ELVMTQSPATLSVSPGERVTLSCWASQGVSNNLAWYQQRPGQAPRLLIYDAFNRATGIPARFSGSGSGTDFTLTISRLEPEDFAVYYCQQFGDSLWTFGQGTKLEIK

SEQ ID NO: 286 - DNA, 321 bp, Artificial Sequence
  VL-P of IgE-G9
gagctcgtgatgacacagtctccagccaccctgtctgtgtctccaggggaaagagtcaccctctcctgctgggccagtcagggtgtgagcaacaacttagcctggtaccagcagagacctggccaggctcccaggctcctcatctatgatgcattcaacagggccactggcatcccagccaggttcagtggcagtgggtctgggacagacttcactctcaccatcagcagactggagcctgaagattttgcggtgtattactgtcagcagtttggtgattcactttggacgttcggccaggggaccaagctggaaatcaaa

SEQ ID NO: 287 - protein, 240 aa, Artificial Sequence
  VH-VL of IgE-G9
EVQLLESGGGLVQPGGSLRLSCAASGFTFSSYAMSWVRQAPGKGLEWVASISSGNIIYYPDNVKGRFTISRDNSKNTLYLQMNSLRAEDTAVYYCTRGRSTYGGFDHWGQGTTVTVSSGGGGSGGGGSGGGGSEIVMTQSPATLSVSPGERVTLSCWASQGVSNNLAWYQQRPGQAPRLLIYDAFNRATGIPARFSGSGSGTDFTLTISRLEPEDFAVYYCQQFGDSLWTFGQGTKLEIK

SEQ ID NO: 288 - DNA, 720 bp, Artificial Sequence
  VH-VL of IgE-G9
gaggtgcagctgctcgagtctgggggaggccttgtgcagcctggagggtctctgaggctctcctgtgcagcctctggattcactttcagtagttatgccatgtcttgggttcgccaggctccagggaaggggctggagtgggtcgcttccattagtagtggtaatatcatctactatccagacaatgtgaagggccgattcaccatctctagagataattccaagaacaccctgtacctgcaaatgaacagtctgagggctgaggacacggccgtgtattattgtactagaggccgcagtacctacgggggatttgaccactggggccaaggcaccacagtcaccgtctcctcaggtggtggtggttctggcggcggcggctccggtggtggtggttctgagatcgtgatgacacagtctccagccaccctgtctgtgtctccaggggaaagagtcaccctctcctgctgggccagtcagggtgtgagcaacaacttagcctggtaccagcagagacctggccaggctcccaggctcctcatctatgatgcattcaacagggccactggcatcccagccaggttcagtggcagtgggtctgggacagacttcactctcaccatcagcagactggagcctgaagattttgcggtgtattactgtcagcagtttggtgattcactttggacgttcggccaggggaccaagctggaaatcaaa

SEQ ID NO: 289 - protein, 240 aa, Artificial Sequence
  VH-VL-P of IgE-G9
EVQLLESGGGLVQPGGSLRLSCAASGFTFSSYAMSWVRQAPGKGLEWVASISSGNIIYYPDNVKGRFTISRDNSKNTLYLQMNSLRAEDTAVYYCTRGRSTYGGFDHWGQGTTVTVSSGGGGSGGGGSGGGGSELVMTQSPATLSVSPGERVTLSCWASQGVSNNLAWYQQRPGQAPRLLIYDAFNRATGIPARFSGSGSGTDFTLTISRLEPEDFAVYYCQQFGDSLWTFGQGTKLEIK

SEQ ID NO: 290 - DNA, 720 bp, Artificial Sequence
  VH-VL-P of IgE-G9
gaggtgcagctgctcgagtctgggggaggccttgtgcagcctggagggtctctgaggctctcctgtgcagcctctggattcactttcagtagttatgccatgtcttgggttcgccaggctccagggaaggggctggagtgggtcgcttccattagtagtggtaatatcatctactatccagacaatgtgaagggccgattcaccatctctagagataattccaagaacaccctgtacctgcaaatgaacagtctgagggctgaggacacggccgtgtattattgtactagaggccgcagtacctacgggggatttgaccactggggccaaggcaccacagtcaccgtctcctcaggtggtggtggttctggcggcggcggctccggtggtggtggttctgagctcgtgatgacacagtctccagccaccctgtctgtgtctccaggggaaagagtcaccctctcctgctgggccagtcagggtgtgagcaacaacttagcctggtaccagcagagacctggccaggctcccaggctcctcatctatgatgcattcaacagggccactggcatcccagccaggttcagtggcagtgggtctgggacagacttcactctcaccatcagcagactggagcctgaagattttgcggtgtattactgtcagcagtttggtgattcactttggacgttcggccaggggaccaagctggaaatcaaa

SEQ ID NO: 291 - protein, 500 aa, Artificial Sequence
  EGF-R 21-63 VL-VH x F6A VH-VL-P
DIVLTQSPASLPVSLGQRATISCRASQSVSSSTYSYIHWYQQKPGQPPKLLITYASNLESGVPARFSGSGSGTDFTLDIHPVEEDDSSTYYCQHSWEIPFTFGSGTKLEIKGGGGSGGGGSGGGGSQVQLQQSGPDLVKPGASVKMSCKASGHTFTDCVIIWVKQRAGQGLEWIGQIYPGTGRSYYNEIFKGKATLTADKSSNTVHIQLSSLTSEDSAVYFCALSTLIHGTWFSYWGQGTLVTVSSGGGGSEVQLLESGGGLVQPGGSLKLSCAASGFTFNIYAMNWVRQAPGKGLEWVARIRSKYNNYATYYADSVKSRFTISRDDSKNTAYLQMNNLKTEDTAVYYCVRHGNFGNSYVSFFAYWGQGTLVTVSSGGGGSGGGGSGGGGSELVVTQEPSLTVSPGGTVTLTCGSSTGAVTSGYYPNWVQQKPGQAPRGLIGGTKFLAPGTPARFSGSLLGGKAALTLSGVQPEDEAEYYCALWYSNRWVFGGGTKLTVL

SEQ ID NO: 292 - DNA, 1500 bp, Artificial Sequence
  EGF-R 21-63 VL-VH x F6A VH-VL-P
gacattgtgctgacacagtctcctgcttccttacctgtgtctctggggcagagggccaccatctcatgcagggccagccaaagtgtcagttcatctacttatagttatatacactggtaccaacagaaaccaggacagccacccaaactcctcatcacgtatgcatccaacctagaatctggggtccctgccaggttcagtggcagtgggtctgggacagacttcaccctcgacatccatcctgtggaggaggatgattcttcaacatattactgtcagcacagttgggagattccatttacgttcggctcggggacaaagttggaaataaaaggtggtggtggttctggcggcggcggctccggtggtggtggttctcaggttcagctgcagcagtctggacctgatctggtgaagcctggggcctcagtgaagatgtcctgcaaggcttctggacacactttcactgactgtgttataatctgggtgaaacagagagctggacagggccttgagtggattggacagatttatccagggactggtcgttcttactacaatgagattttcaagggcaaggccacactgactgcagacaaatcctccaacacagtccacattcaactcagcagcctgacatctgaggactctgcggtctatttctgtgccctatctactcttattcacgggacctggttttcttattggggccaagggactctggtcactgtctcttccggaggtggtggctccgaggtgcagctgctcgagtctggaggaggattggtgcagcctggagggtcattgaaactctcatgtgcagcctctggattcaccttcaatatctacgccatgaactgggtccgccaggctccaggaaagggtttggaatgggttgctcgcataagaagtaaatataataattatgcaacatattatgccgattcagtgaaaagcaggttcaccatctccagagatgattcaaaaaacactgcctatctacaaatgaacaacttgaaaactgaggacactgccgtgtactactgtgtgagacatgggaacttcggtaatagctacgtatccttcttcgcttactggggccaagggactctggtcaccgtctcctcaggtggtggtggttctggcggcggcggctccggtggtggtggttctgagctcgttgtgactcaggaaccttcactcaccgtatcacctggtggaacagtcacactcacttgtggctcctcgactggggctgttacatctggctactacccaaactgggtccaacaaaaaccaggtcaggcaccccgtggtctaataggtgggactaagttcctcgcccccggtactcctgccagattctcaggctccctgcttggaggcaaggctgccctcaccctctcaggggtacagccagaggatgaggcagaatattactgtgctctatggtacagcaaccgctgggtgttcggtggaggaaccaaactgactgtccta

SEQ ID NO: 293 - protein, 500 aa, Artificial Sequence
  EGF-R 21-63 VL-VH x H2C VH-VL
DIVLTQSPASLPVSLGQRATISCRASQSVSSSTYSYIHWYQQKPGQPPKLLITYASNLESGVPARFSGSGSGTDFTLDIHPVEEDDSSTYYCQHSWEIPFTFGSGTKLEIKGGGGSGGGGSGGGGSQVQLQQSGPDLVKPGASVKMSCKASGHTFTDCVIIWVKQRAGQGLEWIGQIYPGTGRSYYNEIFKGKATLTADKSSNTVHIQLSSLTSEDSAVYFCALSTLIHGTWFSYWGQGTLVTVSSGGGGSEVQLVESGGGLVQPGGSLKLSCAASGFTFNKYAMNWVRQAPGKGLEWVARIRSKYNNYATYYADSVKDRFTISRDDSKNTAYLQMNNLKTEDTAVYYCVRHGNFGNSYISYWAYWGQGTLVTVSSGGGGSGGGGSGGGGSQTVVTQEPSLTVSPGGTVTLTCGSSTGAVTSGYYPNWVQQKPGQAPRGLIGGTKFLAPGTPARFSGSLLGGKAALTLSGVQPEDEAEYYCALWYSNRWVFGGGTKLTVL

SEQ ID NO: 294 - DNA, 1500 bp, Artificial Sequence
  EGF-R 21-63 VL-VH x H2C VH-VL
gacattgtgctgacacagtctcctgcttccttacctgtgtctctggggcagagggccaccatctcatgcagggccagccaaagtgtcagttcatctacttatagttatatacactggtaccaacagaaaccaggacagccacccaaactcctcatcacgtatgcatccaacctagaatctggggtccctgccaggttcagtggcagtgggtctgggacagacttcaccctcgacatccatcctgtggaggaggatgattcttcaacatattactgtcagcacagttgggagattccatttacgttcggctcggggacaaagttggaaataaaaggtggtggtggttctggcggcggcggctccggtggtggtggttctcaggttcagctgcagcagtctggacctgatctggtgaagcctggggcctcagtgaagatgtcctgcaaggcttctggacacactttcactgactgtgttataatctgggtgaaacagagagctggacagggccttgagtggattggacagatttatccagggactggtcgttcttactacaatgagattttcaagggcaaggccacactgactgcagacaaatcctccaacacagtccacattcaactcagcagcctgacatctgaggactctgcggtctatttctgtgccctatctactcttattcacgggacctggttttcttattggggccaagggactctggtcactgtctcttccggaggtggtggctccgaggtgcagctggtcgagtctggaggaggattggtgcagcctggagggtcattgaaactctcatgtgcagcctctggattcaccttcaataagtacgccatgaactgggtccgccaggctccaggaaagggtttggaatgggttgctcgcataagaagtaaatataataattatgcaacatattatgccgattcagtgaaagacaggttcaccatctccagagatgattcaaaaaacactgcctatctacaaatgaacaacttgaaaactgaggacactgccgtgtactactgtgtgagacatgggaacttcggtaatagctacatatcctactgggcttactggggccaagggactctggtcaccgtctcctcaggtggtggtggttctggcggcggcggctccggtggtggtggttctcagactgttgtgactcaggaaccttcactcaccgtatcacctggtggaacagtcacactcacttgtggctcctcgactggggctgttacatctggctactacccaaactgggtccaacaaaaaccaggtcaggcaccccgtggtctaataggtgggactaagttcctcgcccccggtactcctgccagattctcaggctccctgcttggaggcaaggctgccctcaccctctcaggggtacagccagaggatgaggcagaatattactgtgctctatggtacagcaaccgctgggtgttcggtggaggaaccaaactgactgtccta

SEQ ID NO: 295 - protein, 500 aa, Artificial Sequence
  EGF-R 21-63 VL-VH x H2C VH-VL-P
DIVLTQSPASLPVSLGQRATISCRASQSVSSSTYSYIHWYQQKPGQPPKLLITYASNLESGVPARFSGSGSGTDFTLDIHPVEEDDSSTYYCQHSWEIPFTFGSGTKLEIKGGGGSGGGGSGGGGSQVQLQQSGPDLVKPGASVKMSCKASGHTFTDCVIIWVKQRAGQGLEWIGQIYPGTGRSYYNEIFKGKATLTADKSSNTVHIQLSSLTSEDSAVYFCALSTLIHGTWFSYWGQGTLVTVSSGGGGSEVQLLESGGGLVQPGGSLKLSCAASGFTFNKYAMNWVRQAPGKGLEWVARIRSKYNNYATYYADSVKDRFTISRDDSKNTAYLQMNNLKTEDTAVYYCVRHGNFGNSYISYWAYWGQGTLVTVSSGGGGSGGGGSGGGGSELVVTQEPSLTVSPGGTVTLTCGSSTGAVTSGYYPNWVQQKPGQAPRGLIGGTKFLAPGTPARFSGSLLGGKAALTLSGVQPEDEAEYYCALWYSNRWVFGGGTKLTVL

SEQ ID NO: 296 - DNA, 1500 bp, Artificial Sequence
  EGF-R 21-63 VL-VH x H2C VH-VL-P
gacattgtgctgacacagtctcctgcttccttacctgtgtctctggggcagagggccaccatctcatgcagggccagccaaagtgtcagttcatctacttatagttatatacactggtaccaacagaaaccaggacagccacccaaactcctcatcacgtatgcatccaacctagaatctggggtccctgccaggttcagtggcagtgggtctgggacagacttcaccctcgacatccatcctgtggaggaggatgattcttcaacatattactgtcagcacagttgggagattccatttacgttcggctcggggacaaagttggaaataaaaggtggtggtggttctggcggcggcggctccggtggtggtggttctcaggttcagctgcagcagtctggacctgatctggtgaagcctggggcctcagtgaagatgtcctgcaaggcttctggacacactttcactgactgtgttataatctgggtgaaacagagagctggacagggccttgagtggattggacagatttatccagggactggtcgttcttactacaatgagattttcaagggcaaggccacactgactgcagacaaatcctccaacacagtccacattcaactcagcagcctgacatctgaggactctgcggtctatttctgtgccctatctactcttattcacgggacctggttttcttattggggccaagggactctggtcactgtctcttccggaggtggtggctccgaggtgcagctgctcgagtctggaggaggattggtgcagcctggagggtcattgaaactctcatgtgcagcctctggattcaccttcaataagtacgccatgaactgggtccgccaggctccaggaaagggtttggaatgggttgctcgcataagaagtaaatataataattatgcaacatattatgccgattcagtgaaagacaggttcaccatctccagagatgattcaaaaaacactgcctatctacaaatgaacaacttgaaaactgaggacactgccgtgtactactgtgtgagacatgggaacttcggtaatagctacatatcctactgggcttactggggccaagggactctggtcaccgtctcctcaggtggtggtggttctggcggcggcggctccggtggtggtggttctgagctcgttgtgactcaggaaccttcactcaccgtatcacctggtggaacagtcacactcacttgtggctcctcgactggggctgttacatctggctactacccaaactgggtccaacaaaaaccaggtcaggcaccccgtggtctaataggtgggactaagttcctcgcccccggtactcctgccagattctcaggctccctgcttggaggcaaggctgccctcaccctctcaggggtacagccagaggatgaggcagaatattactgtgctctatggtacagcaaccgctgggtgttcggtggaggaaccaaactgactgtccta

SEQ ID NO: 297 - protein, 500 aa, Artificial Sequence
  EGF-R 21-63 VL-VH x H1E VH-VL-P
DIVLTQSPASLPVSLGQRATISCRASQSVSSSTYSYIHWYQQKPGQPPKLLITYASNLESGVPARFSGSGSGTDFTLDIHPVEEDDSSTYYCQHSWEIPFTFGSGTKLEIKGGGGSGGGGSGGGGSQVQLQQSGPDLVKPGASVKMSCKASGHTFTDCVIIWVKQRAGQGLEWIGQIYPGTGRSYYNEIFKGKATLTADKSSNTVHIQLSSLTSEDSAVYFCALSTLIHGTWFSYWGQGTLVTVSSGGGGSEVQLLESGGGLEQPGGSLKLSCAASGFTFNSYAMNWVRQAPGKGLEWVARIRSKYNNYATYYADSVKGRFTISRDDSKNTAYLQMNNLKTEDTAVYYCVRHGNFGNSYLSFWAYWGQGTLVTVSSGGGGSGGGGSGGGGSELVVTQEPSLTVSPGGTVTLTCGSSTGAVTSGYYPNWVQQKPGQAPRGLIGGTKFLAPGTPARFSGSLLGGKAALTLSGVQPEDEAEYYCALWYSNRWVFGGGTKLTVL

SEQ ID NO: 298 - DNA, 1500 bp, Artificial Sequence
  EGF-R 21-63 VL-VH x H1E VH-VL-P
gacattgtgctgacacagtctcctgcttccttacctgtgtctctggggcagagggccaccatctcatgcagggccagccaaagtgtcagttcatctacttatagttatatacactggtaccaacagaaaccaggacagccacccaaactcctcatcacgtatgcatccaacctagaatctggggtccctgccaggttcagtggcagtgggtctgggacagacttcaccctcgacatccatcctgtggaggaggatgattcttcaacatattactgtcagcacagttgggagattccatttacgttcggctcggggacaaagttggaaataaaaggtggtggtggttctggcggcggcggctccggtggtggtggttctcaggttcagctgcagcagtctggacctgatctggtgaagcctggggcctcagtgaagatgtcctgcaaggcttctggacacactttcactgactgtgttataatctgggtgaaacagagagctggacagggccttgagtggattggacagatttatccagggactggtcgttcttactacaatgagattttcaagggcaaggccacactgactgcagacaaatcctccaacacagtccacattcaactcagcagcctgacatctgaggactctgcggtctatttctgtgccctatctactcttattcacgggacctggttttcttattggggccaagggactctggtcactgtctcttccggaggtggtggctccgaggtgcagctgctcgagtctggaggaggattggagcagcctggagggtcattgaaactctcatgtgcagcctctggattcaccttcaattcgtacgccatgaactgggtccgccaggctccaggaaagggtttggaatgggttgctcgcataagaagtaaatataataattatgcaacatattatgccgattcagtgaaagggaggttcaccatctccagagatgattcaaaaaacactgcctatctacaaatgaacaacttgaaaactgaggacactgccgtgtactactgtgtgagacatgggaacttcggtaatagctacctatccttctgggcttactggggccaagggactctggtcaccgtctcctcaggtggtggtggttctggcggcggcggctccggtggtggtggttctgagctcgttgtgactcaggaaccttcactcaccgtatcacctggtggaacagtcacactcacttgtggctcctcgactggggctgttacatctggctactacccaaactgggtccaacaaaaaccaggtcaggcaccccgtggtctaataggtgggactaagttcctcgcccccggtactcctgccagattctcaggctccctgcttggaggcaaggctgccctcaccctctcaggggtacagccagaggatgaggcagaatattactgtgctctatggtacagcaaccgctgggtgttcggtggaggaaccaaactgactgtccta

SEQ ID NO: 299 - protein, 500 aa, Artificial Sequence
  EGF-R 21-63 VL-VH x G4H VH-VL-P
DIVLTQSPASLPVSLGQRATISCRASQSVSSSTYSYIHWYQQKPGQPPKLLITYASNLESGVPARFSGSGSGTDFTLDIHPVEEDDSSTYYCQHSWEIPFTFGSGTKLEIKGGGGSGGGGSGGGGSQVQLQQSGPDLVKPGASVKMSCKASGHTFTDCVIIWVKQRAGQGLEWIGQIYPGTGRSYYNEIFKGKATLTADKSSNTVHIQLSSLTSEDSAVYFCALSTLIHGTWFSYWGQGTLVTVSSGGGGSEVQLLESGGGLVQPGGSLKLSCAASGFTFNRYAMNWVRQAPGKGLEWVARIRSKYNNYATYYADSVKGRFTISRDDSKNTAYLQMNNLKTEDTAVYYCVRHGNFGNSYLSYFAYWGQGTLVTVSSGGGGSGGGGSGGGGSELVVTQEPSLTVSPGGTVTLTCGSSTGAVTSGYYPNWVQQKPGQAPRGLIGGTKFLAPGTPARFSGSLLGGKAALTLSGVQPEDEAEYYCALWYSNRWVFGGGTKLTVL

SEQ ID NO: 300 - DNA, 1500 bp, Artificial Sequence
  EGF-R 21-63 VL-VH x G4H VH-VL-P
gacattgtgctgacacagtctcctgcttccttacctgtgtctctggggcagagggccaccatctcatgcagggccagccaaagtgtcagttcatctacttatagttatatacactggtaccaacagaaaccaggacagccacccaaactcctcatcacgtatgcatccaacctagaatctggggtccctgccaggttcagtggcagtgggtctgggacagacttcaccctcgacatccatcctgtggaggaggatgattcttcaacatattactgtcagcacagttgggagattccatttacgttcggctcggggacaaagttggaaataaaaggtggtggtggttctggcggcggcggctccggtggtggtggttctcaggttcagctgcagcagtctggacctgatctggtgaagcctggggcctcagtgaagatgtcctgcaaggcttctggacacactttcactgactgtgttataatctgggtgaaacagagagctggacagggccttgagtggattggacagatttatccagggactggtcgttcttactacaatgagattttcaagggcaaggccacactgactgcagacaaatcctccaacacagtccacattcaactcagcagcctgacatctgaggactctgcggtctatttctgtgccctatctactcttattcacgggacctggttttcttattggggccaagggactctggtcactgtctcttccggaggtggtggctccgaggtgcagctgctcgagtctggaggaggattggtgcagcctggagggtcattgaaactctcatgtgcagcctctggattcaccttcaatcgctacgccatgaactgggtccgccaggctccaggaaagggtttggaatgggttgctcgcataagaagtaaatataataattatgcaacatattatgccgattcagtgaaagggaggttcaccatctccagagatgattcaaaaaacactgcctatctacaaatgaacaacttgaaaactgaggacactgccgtgtactactgtgtgagacatgggaacttcggtaatagctacttatcctacttcgcttactggggccaagggactctggtcaccgtctcctcaggtggtggtggttctggcggcggcggctccggtggtggtggttctgagctcgttgtgactcaggaaccttcactcaccgtatcacctggtggaacagtcacactcacttgtggctcctcgactggggctgttacatctggctactacccaaactgggtccaacaaaaaccaggtcaggcaccccgtggtctaataggtgggactaagttcctcgcccccggtactcctgccagattctcaggctccctgcttggaggcaaggctgccctcaccctctcaggggtacagccagaggatgaggcagaatattactgtgctctatggtacagcaaccgctgggtgttcggtggaggaaccaaactgactgtccta

SEQ ID NO: 301 - protein, 500 aa, Artificial Sequence
  EGF-R 21-63 VL-VH x A2J VH-VL-P
DIVLTQSPASLPVSLGQRATISCRASQSVSSSTYSYIHWYQQKPGQPPKLLITYASNLESGVPARFSGSGSGTDFTLDIHPVEEDDSSTYYCQHSWEIPFTFGSGTKLEIKGGGGSGGGGSGGGGSQVQLQQSGPDLVKPGASVKMSCKASGHTFTDCVIIWVKQRAGQGLEWIGQIYPGTGRSYYNEIFKGKATLTADKSSNTVHIQLSSLTSEDSAVYFCALSTLIHGTWFSYWGQGTLVTVSSGGGGSEVQLLESGGGLVQPGGSLKLSCAASGFTFNVYAMNWVRQAPGKGLEWVARIRSKYNNYATYYADSVKKRFTISRDDSKNTAYLQMNNLKTEDTAVYYCVRHGNFGNSYLSWWAYWGQGTLVTVSSGGGGSGGGGSGGGGSELVVTQEPSLTVSPGGTVTLTCRSSTGAVTSGYYPNWVQQKPGQAPRGLIGATDMRPSGTPARFSGSLLGGKAALTLSGVQPEDEAEYYCALWYSNRWVFGGGTKLTVL

SEQ ID NO: 302 - DNA, 1500 bp, Artificial Sequence
  EGF-R 21-63 VL-VH x A2J VH-VL-P
gacattgtgctgacacagtctcctgcttccttacctgtgtctctggggcagagggccaccatctcatgcagggccagccaaagtgtcagttcatctacttatagttatatacactggtaccaacagaaaccaggacagccacccaaactcctcatcacgtatgcatccaacctagaatctggggtccctgccaggttcagtggcagtgggtctgggacagacttcaccctcgacatccatcctgtggaggaggatgattcttcaacatattactgtcagcacagttgggagattccatttacgttcggctcggggacaaagttggaaataaaaggtggtggtggttctggcggcggcggctccggtggtggtggttctcaggttcagctgcagcagtctggacctgatctggtgaagcctggggcctcagtgaagatgtcctgcaaggcttctggacacactttcactgactgtgttataatctgggtgaaacagagagctggacagggccttgagtggattggacagatttatccagggactggtcgttcttactacaatgagattttcaagggcaaggccacactgactgcagacaaatcctccaacacagtccacattcaactcagcagcctgacatctgaggactctgcggtctatttctgtgccctatctactcttattcacgggacctggttttcttattggggccaagggactctggtcactgtctcttccggaggtggtggctccgaggtgcagctgctcgagtctggaggaggattggtgcagcctggagggtcattgaaactctcatgtgcagcctctggattcaccttcaatgtctacgccatgaactgggtccgccaggctccaggaaagggtttggaatgggttgctcgcataagaagtaaatataataattatgcaacatattatgccgattcagtgaaaaagaggttcaccatctccagagatgattcaaaaaacactgcctatctacaaatgaacaacttgaaaactgaggacactgccgtgtactactgtgtgagacatgggaacttcggtaatagctacttatcctggtgggcttactggggccaagggactctggtcaccgtctcctcaggtggtggtggttctggcggcggcggctccggtggtggtggttctgagctcgttgtgactcaggaaccttcactcaccgtatcacctggtggaacagtcacactcacttgtcgctcctcgactggggctgttacatctggctactacccaaactgggtccaacaaaaaccaggtcaggcaccccgtggtctaataggtgccactgacatgaggccctctggtactcctgccagattctcaggctccctgcttggaggcaaggctgccctcaccctctcaggggtacagccagaggatgaggcagaatattactgtgctctatggtacagcaaccgctgggtgttcggtggaggaaccaaactgactgtccta

SEQ ID NO: 303 - protein, 500 aa, Artificial Sequence
  EGF-R 21-63 VL-VH x E1L VH-VL-P
DIVLTQSPASLPVSLGQRATISCRASQSVSSSTYSYIHWYQQKPGQPPKLLITYASNLESGVPARFSGSGSGTDFTLDIHPVEEDDSSTYYCQHSWEIPFTFGSGTKLEIKGGGGSGGGGSGGGGSQVQLQQSGPDLVKPGASVKMSCKASGHTFTDCVIIWVKQRAGQGLEWIGQIYPGTGRSYYNEIFKGKATLTADKSSNTVHIQLSSLTSEDSAVYFCALSTLIHGTWFSYWGQGTLVTVSSGGGGSEVQLLESGGGLVQPGGSLKLSCAASGFTFNKYAMNWVRQAPGKGLEWVARIRSKYNNYATYYADSVKSRFTISRDDSKNTAYLQMNNLKTEDTAVYYCVRHGNFGNSYTSYYAYWGQGTLVTVSSGGGGSGGGGSGGGGSELVVTQEPSLTVSPGGTVTLTCGSSTGAVTSGYYPNWVQQKPGQAPRGLIGGTKFLAPGTPARFSGSLLGGKAALTLSGVQPEDEAEYYCALWYSNRWVFGGGTKLTVL

SEQ ID NO: 304 - DNA, 1500 bp, Artificial Sequence
  EGF-R 21-63 VL-VH x E1L VH-VL-P
gacattgtgctgacacagtctcctgcttccttacctgtgtctctggggcagagggccaccatctcatgcagggccagccaaagtgtcagttcatctacttatagttatatacactggtaccaacagaaaccaggacagccacccaaactcctcatcacgtatgcatccaacctagaatctggggtccctgccaggttcagtggcagtgggtctgggacagacttcaccctcgacatccatcctgtggaggaggatgattcttcaacatattactgtcagcacagttgggagattccatttacgttcggctcggggacaaagttggaaataaaaggtggtggtggttctggcggcggcggctccggtggtggtggttctcaggttcagctgcagcagtctggacctgatctggtgaagcctggggcctcagtgaagatgtcctgcaaggcttctggacacactttcactgactgtgttataatctgggtgaaacagagagctggacagggccttgagtggattggacagatttatccagggactggtcgttcttactacaatgagattttcaagggcaaggccacactgactgcagacaaatcctccaacacagtccacattcaactcagcagcctgacatctgaggactctgcggtctatttctgtgccctatctactcttattcacgggacctggttttcttattggggccaagggactctggtcactgtctcttccggaggtggtggctccgaggtgcagctgctcgagtctggaggaggattggtgcagcctggagggtcattgaaactctcatgtgcagcctctggattcaccttcaataagtacgccatgaactgggtccgccaggctccaggaaagggtttggaatgggttgctcgcataagaagtaaatataataattatgcaacatattatgccgattcagtgaaatcgaggttcaccatctccagagatgattcaaaaaacactgcctatctacaaatgaacaacttgaaaactgaggacactgccgtgtactactgtgtgagacatgggaacttcggtaatagctacacatcctactacgcttactggggccaagggactctggtcaccgtctcctcaggtggtggtggttctggcggcggcggctccggtggtggtggttctgagctcgttgtgactcaggaaccttcactcaccgtatcacctggtggaacagtcacactcacttgtggctcctcgactggggctgttacatctggctactacccaaactgggtccaacaaaaaccaggtcaggcaccccgtggtctaataggtgggactaagttcctcgcccccggtactcctgccagattctcaggctccctgcttggaggcaaggctgccctcaccctctcaggggtacagccagaggatgaggcagaatattactgtgctctatggtacagcaaccgctgggtgttcggtggaggaaccaaactgactgtccta

SEQ ID NO: 305 - protein, 500 aa, Artificial Sequence
  EGF-R 21-63 VL-VH x E2M VH-VL-P
DIVLTQSPASLPVSLGQRATISCRASQSVSSSTYSYIHWYQQKPGQPPKLLITYASNLESGVPARFSGSGSGTDFTLDIHPVEEDDSSTYYCQHSWEIPFTFGSGTKLEIKGGGGSGGGGSGGGGSQVQLQQSGPDLVKPGASVKMSCKASGHTFTDCVIIWVKQRAGQGLEWIGQIYPGTGRSYYNEIFKGKATLTADKSSNTVHIQLSSLTSEDSAVYFCALSTLIHGTWFSYWGQGTLVTVSSGGGGSEVQLLESGGGLVQPGGSLKLSCAASGFTFNGYAMNWVRQAPGKGLEWVARIRSKYNNYATYYADSVKERFTISRDDSKNTAYLQMNNLKTEDTAVYYCVRHRNFGNSYLSWFAYWGQGTLVTVSSGGGGSGGGGSGGGGSELVVTQEPSLTVSPGGTVTLTCRSSTGAVTSGYYPNWVQQKPGQAPRGLIGATDMRPSGTPARFSGSLLGGKAALTLSGVQPEDEAEYYCALWYSNRWVFGGGTKLTVL

SEQ ID NO: 306 - DNA, 1500 bp, Artificial Sequence
  EGF-R 21-63 VL-VH x E2M VH-VL-P
gacattgtgctgacacagtctcctgcttccttacctgtgtctctggggcagagggccaccatctcatgcagggccagccaaagtgtcagttcatctacttatagttatatacactggtaccaacagaaaccaggacagccacccaaactcctcatcacgtatgcatccaacctagaatctggggtccctgccaggttcagtggcagtgggtctgggacagacttcaccctcgacatccatcctgtggaggaggatgattcttcaacatattactgtcagcacagttgggagattccatttacgttcggctcggggacaaagttggaaataaaaggtggtggtggttctggcggcggcggctccggtggtggtggttctcaggttcagctgcagcagtctggacctgatctggtgaagcctggggcctcagtgaagatgtcctgcaaggcttctggacacactttcactgactgtgttataatctgggtgaaacagagagctggacagggccttgagtggattggacagatttatccagggactggtcgttcttactacaatgagattttcaagggcaaggccacactgactgcagacaaatcctccaacacagtccacattcaactcagcagcctgacatctgaggactctgcggtctatttctgtgccctatctactcttattcacgggacctggttttcttattggggccaagggactctggtcactgtctcttccggaggtggtggctccgaggtgcagctgctcgagtctggaggaggattggtgcagcctggagggtcattgaaactctcatgtgcagcctctggattcaccttcaatggctacgccatgaactgggtccgccaggctccaggaaagggtttggaatgggttgctcgcataagaagtaaatataataattatgcaacatattatgccgattcagtgaaagagaggttcaccatctccagagatgattcaaaaaacactgcctatctacaaatgaacaacttgaaaactgaggacactgccgtgtactactgtgtgagacataggaacttcggtaatagctacttatcctggttcgcttactggggccaagggactctggtcaccgtctcctcaggtggtggtggttctggcggcggcggctccggtggtggtggttctgagctcgttgtgactcaggaaccttcactcaccgtatcacctggtggaacagtcacactcacttgtcgctcctcgactggggctgttacatctggctactacccaaactgggtccaacaaaaaccaggtcaggcaccccgtggtctaataggtgccactgacatgaggccctctggtactcctgccagattctcaggctccctgcttggaggcaaggctgccctcaccctctcaggggtacagccagaggatgaggcagaatattactgtgctctatggtacagcaaccgctgggtgttcggtggaggaaccaaactgactgtccta

SEQ ID NO: 307 - protein, 500 aa, Artificial Sequence
  EGF-R 21-63 VL-VH x F7O VH-VL-P
DIVLTQSPASLPVSLGQRATISCRASQSVSSSTYSYIHWYQQKPGQPPKLLITYASNLESGVPARFSGSGSGTDFTLDIHPVEEDDSSTYYCQHSWEIPFTFGSGTKLEIKGGGGSGGGGSGGGGSQVQLQQSGPDLVKPGASVKMSCKASGHTFTDCVIIWVKQRAGQGLEWIGQIYPGTGRSYYNEIFKGKATLTADKSSNTVHIQLSSLTSEDSAVYFCALSTLIHGTWFSYWGQGTLVTVSSGGGGSEVQLLESGGGLVQPGGSLKLSCAASGFTFNVYAMNWVRQAPGKGLEWVARIRSKYNNYATYYADSVKKRFTISRDDSKNTAYLQMNNLKTEDTAVYYCVRHGNFGNSYISWWAYWGQGTLVTVSSGGGGSGGGGSGGGGSELVVTQEPSLTVSPGGTVTLTCGSSTGAVTSGYYPNWVQQKPGQAPRGLIGGTKFLAPGTPARFSGSLLGGKAALTLSGVQPEDEAEYYCALWYSNRWVFGGGTKLTVL

SEQ ID NO: 308 - DNA, 1500 bp, Artificial Sequence
  EGF-R 21-63 VL-VH x F7O VH-VL-P
gacattgtgctgacacagtctcctgcttccttacctgtgtctctggggcagagggccaccatctcatgcagggccagccaaagtgtcagttcatctacttatagttatatacactggtaccaacagaaaccaggacagccacccaaactcctcatcacgtatgcatccaacctagaatctggggtccctgccaggttcagtggcagtgggtctgggacagacttcaccctcgacatccatcctgtggaggaggatgattcttcaacatattactgtcagcacagttgggagattccatttacgttcggctcggggacaaagttggaaataaaaggtggtggtggttctggcggcggcggctccggtggtggtggttctcaggttcagctgcagcagtctggacctgatctggtgaagcctggggcctcagtgaagatgtcctgcaaggcttctggacacactttcactgactgtgttataatctgggtgaaacagagagctggacagggccttgagtggattggacagatttatccagggactggtcgttcttactacaatgagattttcaagggcaaggccacactgactgcagacaaatcctccaacacagtccacattcaactcagcagcctgacatctgaggactctgcggtctatttctgtgccctatctactcttattcacgggacctggttttcttattggggccaagggactctggtcactgtctcttccggaggtggtggctccgaggtgcagctgctcgagtctggaggaggattggtgcagcctggagggtcattgaaactctcatgtgcagcctctggattcaccttcaatgtgtacgccatgaactgggtccgccaggctccaggaaagggtttggaatgggttgctcgcataagaagtaaatataataattatgcaacatattatgccgattcagtgaaaaagaggttcaccatctccagagatgattcaaaaaacactgcctatctacaaatgaacaacttgaaaactgaggacactgccgtgtactactgtgtgagacatgggaacttcggtaatagctacatatcctggtgggcttactggggccaagggactctggtcaccgtctcctcaggtggtggtggttctggcggcggcggctccggtggtggtggttctgagctcgttgtgactcaggaaccttcactcaccgtatcacctggtggaacagtcacactcacttgtggctcctcgactggggctgttacatctggctactacccaaactgggtccaacaaaaaccaggtcaggcaccccgtggtctaataggtgggactaagttcctcgcccccggtactcctgccagattctcaggctccctgcttggaggcaaggctgccctcaccctctcaggggtacagccagaggatgaggcagaatattactgtgctctatggtacagcaaccgctgggtgttcggtggaggaaccaaactgactgtccta

SEQ ID NO: 309 - protein, 500 aa, Artificial Sequence
  MCSP-G4 VH-VL x H2C VH-VL
QVQLVQSGAEVKRPGASMKVSCKASGYTFTNYYIHWVRQAPGQGLEWMGWINPNSGATNYAQKFQGRVTMTRDTSTSTVYMELSSLRSEDTAVYYCAKSWVSWFASWGQGTLVTVSSGGGGSGGGGSGGGGSDIVMTQSPDSLAVSLGERATINCKSSQSVLNSSNNRNYLAWYQQKPGQPPKLLIYWASTRESGVPDRFSGSGSGTDFTLTISGLQAEDVAVYYCQQHYSTPFTFGPGTKVDIKSGGGGSEVQLVESGGGLVQPGGSLKLSCAASGFTFNKYAMNWVRQAPGKGLEWVARIRSKYNNYATYYADSVKDRFTISRDDSKNTAYLQMNNLKTEDTAVYYCVRHGNFGNSYISYWAYWGQGTLVTVSSGGGGSGGGGSGGGGSQTVVTQEPSLTVSPGGTVTLTCGSSTGAVTSGYYPNWVQQKPGQAPRGLIGGTKFLAPGTPARFSGSLLGGKAALTLSGVQPEDEAEYYCALWYSNRWVFGGGTKLTVL

SEQ ID NO: 310 - DNA, 1500 bp, Artificial Sequence
  MCSP-G4 VH-VL x H2C VH-VL
caggtgcagctggtccagtctggggctgaggtgaagaggcctggggcctcaatgaaggtctcctgcaaggcttctgggtacaccttcaccaactactatatacactgggtgcgacaggcccctggacaaggtcttgagtggatgggttggatcaaccctaacagtggtgccacaaactatgcacagaagttccagggcagagtcaccatgaccagggacacgtccacgagcacagtctacatggagctgagcagcctgagatctgaggacacggccgtgtattactgtgcgaaatcctgggtctcctggtttgcttcctggggtcaaggaaccttggtcaccgtctcctcaggtggtggtggttctggcggcggcggctccggtggtggtggttctgatatcgtgatgacccagtctccagactccctggctgtgtctctgggcgagagggccaccatcaactgcaagtccagccagagtgttttaaacagctccaacaataggaactacttagcttggtaccagcagaaaccaggacagcctcctaagctgctcatttactgggcatctacccgggaatccggggtccctgaccgattcagtggcagcgggtctgggacagatttcactctcaccatcagtggcctgcaggctgaagatgtggcagtttattactgtcagcaacattatagtactccattcacttttggccctgggaccaaagtggatatcaaatccggaggtggtggatccgaggtgcagctggtcgagtctggaggaggattggtgcagcctggagggtcattgaaactctcatgtgcagcctctggattcaccttcaataagtacgccatgaactgggtccgccaggctccaggaaagggtttggaatgggttgctcgcataagaagtaaatataataattatgcaacatattatgccgattcagtgaaagacaggttcaccatctccagagatgattcaaaaaacactgcctatctacaaatgaacaacttgaaaactgaggacactgccgtgtactactgtgtgagacatgggaacttcggtaatagctacatatcctactgggcttactggggccaagggactctggtcaccgtctcctcaggtggtggtggttctggcggcggcggctccggtggtggtggttctcagactgttgtgactcaggaaccttcactcaccgtatcacctggtggaacagtcacactcacttgtggctcctcgactggggctgttacatctggctactacccaaactgggtccaacaaaaaccaggtcaggcaccccgtggtctaataggtgggactaagttcctcgcccccggtactcctgccagattctcaggctccctgcttggaggcaaggctgccctcaccctctcaggggtacagccagaggatgaggcagaatattactgtgctctatggtacagcaaccgctgggtgttcggtggaggaaccaaactgactgtccta

SEQ ID NO: 311 - protein, 500 aa, Artificial Sequence
  MCSP-G4 VH-VL x F12Q VH-VL
QVQLVQSGAEVKRPGASMKVSCKASGYTFTNYYIHWVRQAPGQGLEWMGWINPNSGATNYAQKFQGRVTMTRDTSTSTVYMELSSLRSEDTAVYYCAKSWVSWFASWGQGTLVTVSSGGGGSGGGGSGGGGSDIVMTQSPDSLAVSLGERATINCKSSQSVLNSSNNRNYLAWYQQKPGQPPKLLIYWASTRESGVPDRFSGSGSGTDFTLTISGLQAEDVAVYYCQQHYSTPFTFGPGTKVDIKSGGGGSEVQLVESGGGLVQPGGSLKLSCAASGFTFNSYAMNWVRQAPGKGLEWVARIRSKYNNYATYYADSVKGRFTISRDDSKNTAYLQMNNLKTEDTAVYYCVRHGNFGNSYVSWWAYWGQGTLVTVSSGGGGSGGGGSGGGGSQTVVTQEPSLTVSPGGTVTLTCGSSTGAVTSGNYPNWVQQKPGQAPRGLIGGTKFLAPGTPARFSGSLLGGKAALTLSGVQPEDEAEYYCVLWYSNRWVFGGGTKLTVL

SEQ ID NO: 312 - DNA, 1500 bp, Artificial Sequence
  MCSP-G4 VH-VL x F12Q VH-VL
caggtgcagctggtccagtctggggctgaggtgaagaggcctggggcctcaatgaaggtctcctgcaaggcttctgggtacaccttcaccaactactatatacactgggtgcgacaggcccctggacaaggtcttgagtggatgggttggatcaaccctaacagtggtgccacaaactatgcacagaagttccagggcagagtcaccatgaccagggacacgtccacgagcacagtctacatggagctgagcagcctgagatctgaggacacggccgtgtattactgtgcgaaatcctgggtctcctggtttgcttcctggggtcaaggaaccttggtcaccgtctcctcaggtggtggtggttctggcggcggcggctccggtggtggtggttctgatatcgtgatgacccagtctccagactccctggctgtgtctctgggcgagagggccaccatcaactgcaagtccagccagagtgttttaaacagctccaacaataggaactacttagcttggtaccagcagaaaccaggacagcctcctaagctgctcatttactgggcatctacccgggaatccggggtccctgaccgattcagtggcagcgggtctgggacagatttcactctcaccatcagtggcctgcaggctgaagatgtggcagtttattactgtcagcaacattatagtactccattcacttttggccctgggaccaaagtggatatcaaatccggaggtggtggatccgaggtgcagctggtcgagtctggaggaggattggtgcagcctggagggtcattgaaactctcatgtgcagcctctggattcaccttcaatagctacgccatgaactgggtccgccaggctccaggaaagggtttggaatgggttgctcgcataagaagtaaatataataattatgcaacatattatgccgattcagtgaaaggcaggttcaccatctccagagatgattcaaaaaacactgcctatctacaaatgaacaacttgaaaactgaggacactgccgtgtactactgtgtgagacatgggaacttcggtaatagctacgtttcctggtgggcttactggggccaagggactctggtcaccgtctcctcaggtggtggtggttctggcggcggcggctccggtggtggtggttctcagactgttgtgactcaggaaccttcactcaccgtatcacctggtggaacagtcacactcacttgtggctcctcgactggggctgttacatctggcaactacccaaactgggtccaacaaaaaccaggtcaggcaccccgtggtctaataggtgggactaagttcctcgcccccggtactcctgccagattctcaggctccctgcttggaggcaaggctgccctcaccctctcaggggtacagccagaggatgaggcagaatattactgtgttctatggtacagcaaccgctgggtgttcggtggaggaaccaaactgactgtccta

SEQ ID NO: 313 - protein, 500 aa, Artificial Sequence
  MCSP-G4 VH-VL x I2C VH-VL
QVQLVQSGAEVKRPGASMKVSCKASGYTFTNYYIHWVRQAPGQGLEWMGWINPNSGATNYAQKFQGRVTMTRDTSTSTVYMELSSLRSEDTAVYYCAKSWVSWFASWGQGTLVTVSSGGGGSGGGGSGGGGSDIVMTQSPDSLAVSLGERATINCKSSQSVLNSSNNRNYLAWYQQKPGQPPKLLIYWASTRESGVPDRFSGSGSGTDFTLTISGLQAEDVAVYYCQQHYSTPFTFGPGTKVDIKSGGGGSEVQLVESGGGLVQPGGSLKLSCAASGFTFNKYAMNWVRQAPGKGLEWVARIRSKYNNYATYYADSVKDRFTISRDDSKNTAYLQMNNLKTEDTAVYYCVRHGNFGNSYISYWAYWGQGTLVTVSSGGGGSGGGGSGGGGSQTVVTQEPSLTVSPGGTVTLTCGSSTGAVTSGNYPNWVQQKPGQAPRGLIGGTKFLAPGTPARFSGSLLGGKAALTLSGVQPEDEAEYYCVLWYSNRWVFGGGTKLTVL

SEQ ID NO: 314 - DNA, 1500 bp, Artificial Sequence
  MCSP-G4 VH-VL x I2C VH-VL
caggtgcagctggtccagtctggggctgaggtgaagaggcctggggcctcaatgaaggtctcctgcaaggcttctgggtacaccttcaccaactactatatacactgggtgcgacaggcccctggacaaggtcttgagtggatgggttggatcaaccctaacagtggtgccacaaactatgcacagaagttccagggcagagtcaccatgaccagggacacgtccacgagcacagtctacatggagctgagcagcctgagatctgaggacacggccgtgtattactgtgcgaaatcctgggtctcctggtttgcttcctggggtcaaggaaccttggtcaccgtctcctcaggtggtggtggttctggcggcggcggctccggtggtggtggttctgatatcgtgatgacccagtctccagactccctggctgtgtctctgggcgagagggccaccatcaactgcaagtccagccagagtgttttaaacagctccaacaataggaactacttagcttggtaccagcagaaaccaggacagcctcctaagctgctcatttactgggcatctacccgggaatccggggtccctgaccgattcagtggcagcgggtctgggacagatttcactctcaccatcagtggcctgcaggctgaagatgtggcagtttattactgtcagcaacattatagtactccattcacttttggccctgggaccaaagtggatatcaaatccggaggtggtggatccgaggtgcagctggtcgagtctggaggaggattggtgcagcctggagggtcattgaaactctcatgtgcagcctctggattcaccttcaataagtacgccatgaactgggtccgccaggctccaggaaagggtttggaatgggttgctcgcataagaagtaaatataataattatgcaacatattatgccgattcagtgaaagacaggttcaccatctccagagatgattcaaaaaacactgcctatctacaaatgaacaacttgaaaactgaggacactgccgtgtactactgtgtgagacatgggaacttcggtaatagctacatatcctactgggcttactggggccaagggactctggtcaccgtctcctcaggtggtggtggttctggcggcggcggctccggtggtggtggttctcagactgttgtgactcaggaaccttcactcaccgtatcacctggtggaacagtcacactcacttgtggctcctcgactggggctgttacatctggcaactacccaaactgggtccaacaaaaaccaggtcaggcaccccgtggtctaataggtgggactaagttcctcgcccccggtactcctgccagattctcaggctccctgcttggaggcaaggctgccctcaccctctcaggggtacagccagaggatgaggcagaatattactgtgttctatggtacagcaaccgctgggtgttcggtggaggaaccaaactgactgtccta

SEQ ID NO: 315 - protein, 500 aa, Artificial Sequence
  MCSP-G4 VH-VL-P x F6A VH-VL-P
QVQLVQSGAEVKRPGASMKVSCKASGYTFTNYYIHWVRQAPGQGLEWMGWINPNSGATNYAQKFQGRVTMTRDTSTSTVYMELSSLRSEDTAVYYCAKSWVSWFASWGQGTLVTVSSGGGGSGGGGSGGGGSELVMTQSPDSLAVSLGERATINCKSSQSVLNSSNNRNYLAWYQQKPGQPPKLLIYWASTRESGVPDRFSGSGSGTDFTLTISGLQAEDVAVYYCQQHYSTPFTFGPGTKVDIKSGGGGSEVQLLESGGGLVQPGGSLKLSCAASGFTFNIYAMNWVRQAPGKGLEWVARIRSKYNNYATYYADSVKSRFTISRDDSKNTAYLQMNNLKTEDTAVYYCVRHGNFGNSYVSFFAYWGQGTLVTVSSGGGGSGGGGSGGGGSELVVTQEPSLTVSPGGTVTLTCGSSTGAVTSGYYPNWVQQKPGQAPRGLIGGTKFLAPGTPARFSGSLLGGKAALTLSGVQPEDEAEYYCALWYSNRWVFGGGTKLTVL

SEQ ID NO: 316 - DNA, 1500 bp, Artificial Sequence
  MCSP-G4 VH-VL-P x F6A VH-VL-P
caggtgcagctggtccagtctggggctgaggtgaagaggcctggggcctcaatgaaggtctcctgcaaggcttctgggtacaccttcaccaactactatatacactgggtgcgacaggcccctggacaaggtcttgagtggatgggttggatcaaccctaacagtggtgccacaaactatgcacagaagttccagggcagagtcaccatgaccagggacacgtccacgagcacagtctacatggagctgagcagcctgagatctgaggacacggccgtgtattactgtgcgaaatcctgggtctcctggtttgcttcctggggtcaaggaaccttggtcaccgtctcctcaggtggtggtggttctggcggcggcggctccggtggtggtggttctgagctcgtgatgacccagtctccagactccctggctgtgtctctgggcgagagggccaccatcaactgcaagtccagccagagtgttttaaacagctccaacaataggaactacttagcttggtaccagcagaaaccaggacagcctcctaagctgctcatttactgggcatctacccgggaatccggggtccctgaccgattcagtggcagcgggtctgggacagatttcactctcaccatcagtggcctgcaggctgaagatgtggcagtttattactgtcagcaacattatagtactccattcacttttggccctgggaccaaagtggatatcaaatccggaggtggtggatccgaggtgcagctgctcgagtctggaggaggattggtgcagcctggagggtcattgaaactctcatgtgcagcctctggattcaccttcaatatctacgccatgaactgggtccgccaggctccaggaaagggtttggaatgggttgctcgcataagaagtaaatataataattatgcaacatattatgccgattcagtgaaaagcaggttcaccatctccagagatgattcaaaaaacactgcctatctacaaatgaacaacttgaaaactgaggacactgccgtgtactactgtgtgagacatgggaacttcggtaatagctacgtatccttcttcgcttactggggccaagggactctggtcaccgtctcctcaggtggtggtggttctggcggcggcggctccggtggtggtggttctgagctcgttgtgactcaggaaccttcactcaccgtatcacctggtggaacagtcacactcacttgtggctcctcgactggggctgttacatctggctactacccaaactgggtccaacaaaaaccaggtcaggcaccccgtggtctaataggtgggactaagttcctcgcccccggtactcctgccagattctcaggctccctgcttggaggcaaggctgccctcaccctctcaggggtacagccagaggatgaggcagaatattactgtgctctatggtacagcaaccgctgggtgttcggtggaggaaccaaactgactgtccta

SEQ ID NO: 317 - protein, 500 aa, Artificial Sequence
  MCSP-G4 VH-VL-P x H2C VH-VL-P
QVQLVQSGAEVKRPGASMKVSCKASGYTFTNYYIHWVRQAPGQGLEWMGWINPNSGATNYAQKFQGRVTMTRDTSTSTVYMELSSLRSEDTAVYYCAKSWVSWFASWGQGTLVTVSSGGGGSGGGGSGGGGSELVMTQSPDSLAVSLGERATINCKSSQSVLNSSNNRNYLAWYQQKPGQPPKLLIYWASTRESGVPDRFSGSGSGTDFTLTISGLQAEDVAVYYCQQHYSTPFTFGPGTKVDIKSGGGGSEVQLLESGGGLVQPGGSLKLSCAASGFTFNKYAMNWVRQAPGKGLEWVARIRSKYNNYATYYADSVKDRFTISRDDSKNTAYLQMNNLKTEDTAVYYCVRHGNFGNSYISYWAYWGQGTLVTVSSGGGGSGGGGSGGGGSELVVTQEPSLTVSPGGTVTLTCGSSTGAVTSGYYPNWVQQKPGQAPRGLIGGTKFLAPGTPARFSGSLLGGKAALTLSGVQPEDEAEYYCALWYSNRWVFGGGTKLTVL

SEQ ID NO: 318 - DNA, 1500 bp, Artificial Sequence
  MCSP-G4 VH-VL-P x H2C VH-VL-P
caggtgcagctggtccagtctggggctgaggtgaagaggcctggggcctcaatgaaggtctcctgcaaggcttctgggtacaccttcaccaactactatatacactgggtgcgacaggcccctggacaaggtcttgagtggatgggttggatcaaccctaacagtggtgccacaaactatgcacagaagttccagggcagagtcaccatgaccagggacacgtccacgagcacagtctacatggagctgagcagcctgagatctgaggacacggccgtgtattactgtgcgaaatcctgggtctcctggtttgcttcctggggtcaaggaaccttggtcaccgtctcctcaggtggtggtggttctggcggcggcggctccggtggtggtggttctgagctcgtgatgacccagtctccagactccctggctgtgtctctgggcgagagggccaccatcaactgcaagtccagccagagtgttttaaacagctccaacaataggaactacttagcttggtaccagcagaaaccaggacagcctcctaagctgctcatttactgggcatctacccgggaatccggggtccctgaccgattcagtggcagcgggtctgggacagatttcactctcaccatcagtggcctgcaggctgaagatgtggcagtttattactgtcagcaacattatagtactccattcacttttggccctgggaccaaagtggatatcaaatccggaggtggtggatccgaggtgcagctgctcgagtctggaggaggattggtgcagcctggagggtcattgaaactctcatgtgcagcctctggattcaccttcaataagtacgccatgaactgggtccgccaggctccaggaaagggtttggaatgggttgctcgcataagaagtaaatataataattatgcaacatattatgccgattcagtgaaagacaggttcaccatctccagagatgattcaaaaaacactgcctatctacaaatgaacaacttgaaaactgaggacactgccgtgtactactgtgtgagacatgggaacttcggtaatagctacatatcctactgggcttactggggccaagggactctggtcaccgtctcctcaggtggtggtggttctggcggcggcggctccggtggtggtggttctgagctcgttgtgactcaggaaccttcactcaccgtatcacctggtggaacagtcacactcacttgtggctcctcgactggggctgttacatctggctactacccaaactgggtccaacaaaaaccaggtcaggcaccccgtggtctaataggtgggactaagttcctcgcccccggtactcctgccagattctcaggctccctgcttggaggcaaggctgccctcaccctctcaggggtacagccagaggatgaggcagaatattactgtgctctatggtacagcaaccgctgggtgttcggtggaggaaccaaactgactgtccta

SEQ ID NO: 319 - protein, 500 aa, Artificial Sequence
  MCSP-G4 VH-VL-P x H1E VH-VL-P
QVQLVQSGAEVKRPGASMKVSCKASGYTFTNYYIHWVRQAPGQGLEWMGWINPNSGATNYAQKFQGRVTMTRDTSTSTVYMELSSLRSEDTAVYYCAKSWVSWFASWGQGTLVTVSSGGGGSGGGGSGGGGSELVMTQSPDSLAVSLGERATINCKSSQSVLNSSNNRNYLAWYQQKPGQPPKLLIYWASTRESGVPDRFSGSGSGTDFTLTISGLQAEDVAVYYCQQHYSTPFTFGPGTKVDIKSGGGGSEVQLLESGGGLEQPGGSLKLSCAASGFTFNSYAMNWVRQAPGKGLEWVARIRSKYNNYATYYADSVKGRFTISRDDSKNTAYLQMNNLKTEDTAVYYCVRHGNFGNSYLSFWAYWGQGTLVTVSSGGGGSGGGGSGGGGSELVVTQEPSLTVSPGGTVTLTCGSSTGAVTSGYYPNWVQQKPGQAPRGLIGGTKFLAPGTPARFSGSLLGGKAALTLSGVQPEDEAEYYCALWYSNRWVFGGGTKLTVL

SEQ ID NO: 320 - DNA, 1500 bp, Artificial Sequence
  MCSP-G4 VH-VL-P x H1E VH-VL-P
caggtgcagctggtccagtctggggctgaggtgaagaggcctggggcctcaatgaaggtctcctgcaaggcttctgggtacaccttcaccaactactatatacactgggtgcgacaggcccctggacaaggtcttgagtggatgggttggatcaaccctaacagtggtgccacaaactatgcacagaagttccagggcagagtcaccatgaccagggacacgtccacgagcacagtctacatggagctgagcagcctgagatctgaggacacggccgtgtattactgtgcgaaatcctgggtctcctggtttgcttcctggggtcaaggaaccttggtcaccgtctcctcaggtggtggtggttctggcggcggcggctccggtggtggtggttctgagctcgtgatgacccagtctccagactccctggctgtgtctctgggcgagagggccaccatcaactgcaagtccagccagagtgttttaaacagctccaacaataggaactacttagcttggtaccagcagaaaccaggacagcctcctaagctgctcatttactgggcatctacccgggaatccggggtccctgaccgattcagtggcagcgggtctgggacagatttcactctcaccatcagtggcctgcaggctgaagatgtggcagtttattactgtcagcaacattatagtactccattcacttttggccctgggaccaaagtggatatcaaatccggaggtggtggatccgaggtgcagctgctcgagtctggaggaggattggagcagcctggagggtcattgaaactctcatgtgcagcctctggattcaccttcaattcgtacgccatgaactgggtccgccaggctccaggaaagggtttggaatgggttgctcgcataagaagtaaatataataattatgcaacatattatgccgattcagtgaaagggaggttcaccatctccagagatgattcaaaaaacactgcctatctacaaatgaacaacttgaaaactgaggacactgccgtgtactactgtgtgagacatgggaacttcggtaatagctacctatccttctgggcttactggggccaagggactctggtcaccgtctcctcaggtggtggtggttctggcggcggcggctccggtggtggtggttctgagctcgttgtgactcaggaaccttcactcaccgtatcacctggtggaacagtcacactcacttgtggctcctcgactggggctgttacatctggctactacccaaactgggtccaacaaaaaccaggtcaggcaccccgtggtctaataggtgggactaagttcctcgcccccggtactcctgccagattctcaggctccctgcttggaggcaaggctgccctcaccctctcaggggtacagccagaggatgaggcagaatattactgtgctctatggtacagcaaccgctgggtgttcggtggaggaaccaaactgactgtccta

SEQ ID NO: 321 - protein, 500 aa, Artificial Sequence
  MCSP-G4 VH-VL-P x G4H VH-VL-P
QVQLVQSGAEVKRPGASMKVSCKASGYTFTNYYIHWVRQAPGQGLEWMGWINPNSGATNYAQKFQGRVTMTRDTSTSTVYMELSSLRSEDTAVYYCAKSWVSWFASWGQGTLVTVSSGGGGSGGGGSGGGGSELVMTQSPDSLAVSLGERATINCKSSQSVLNSSNNRNYLAWYQQKPGQPPKLLIYWASTRESGVPDRFSGSGSGTDFTLTISGLQAEDVAVYYCQQHYSTPFTFGPGTKVDIKSGGGGSEVQLLESGGGLVQPGGSLKLSCAASGFTFNRYAMNWVRQAPGKGLEWVARIRSKYNNYATYYADSVKGRFTISRDDSKNTAYLQMNNLKTEDTAVYYCVRHGNFGNSYLSYFAYWGQGTLVTVSSGGGGSGGGGSGGGGSELVVTQEPSLTVSPGGTVTLTCGSSTGAVTSGYYPNWVQQKPGQAPRGLIGGTKFLAPGTPARFSGSLLGGKAALTLSGVQPEDEAEYYCALWYSNRWVFGGGTKLTVL

SEQ ID NO: 322 - DNA, 1500 bp, Artificial Sequence
  MCSP-G4 VH-VL-P x G4H VH-VL-P
caggtgcagctggtccagtctggggctgaggtgaagaggcctggggcctcaatgaaggtctcctgcaaggcttctgggtacaccttcaccaactactatatacactgggtgcgacaggcccctggacaaggtcttgagtggatgggttggatcaaccctaacagtggtgccacaaactatgcacagaagttccagggcagagtcaccatgaccagggacacgtccacgagcacagtctacatggagctgagcagcctgagatctgaggacacggccgtgtattactgtgcgaaatcctgggtctcctggtttgcttcctggggtcaaggaaccttggtcaccgtctcctcaggtggtggtggttctggcggcggcggctccggtggtggtggttctgagctcgtgatgacccagtctccagactccctggctgtgtctctgggcgagagggccaccatcaactgcaagtccagccagagtgttttaaacagctccaacaataggaactacttagcttggtaccagcagaaaccaggacagcctcctaagctgctcatttactgggcatctacccgggaatccggggtccctgaccgattcagtggcagcgggtctgggacagatttcactctcaccatcagtggcctgcaggctgaagatgtggcagtttattactgtcagcaacattatagtactccattcacttttggccctgggaccaaagtggatatcaaatccggaggtggtggatccgaggtgcagctgctcgagtctggaggaggattggtgcagcctggagggtcattgaaactctcatgtgcagcctctggattcaccttcaatcgctacgccatgaactgggtccgccaggctccaggaaagggtttggaatgggttgctcgcataagaagtaaatataataattatgcaacatattatgccgattcagtgaaagggaggttcaccatctccagagatgattcaaaaaacactgcctatctacaaatgaacaacttgaaaactgaggacactgccgtgtactactgtgtgagacatgggaacttcggtaatagctacttatcctacttcgcttactggggccaagggactctggtcaccgtctcctcaggtggtggtggttctggcggcggcggctccggtggtggtggttctgagctcgttgtgactcaggaaccttcactcaccgtatcacctggtggaacagtcacactcacttgtggctcctcgactggggctgttacatctggctactacccaaactgggtccaacaaaaaccaggtcaggcaccccgtggtctaataggtgggactaagttcctcgcccccggtactcctgccagattctcaggctccctgcttggaggcaaggctgccctcaccctctcaggggtacagccagaggatgaggcagaatattactgtgctctatggtacagcaaccgctgggtgttcggtggaggaaccaaactgactgtccta

SEQ ID NO: 323 - protein, 500 aa, Artificial Sequence
  MCSP-G4 VH-VL-P x A2J VH-VL-P
QVQLVQSGAEVKRPGASMKVSCKASGYTFTNYYIHWVRQAPGQGLEWMGWINPNSGATNYAQKFQGRVTMTRDTSTSTVYMELSSLRSEDTAVYYCAKSWVSWFASWGQGTLVTVSSGGGGSGGGGSGGGGSELVMTQSPDSLAVSLGERATINCKSSQSVLNSSNNRNYLAWYQQKPGQPPKLLIYWASTRESGVPDRFSGSGSGTDFTLTISGLQAEDVAVYYCQQHYSTPFTFGPGTKVDIKSGGGGSEVQLLESGGGLVQPGGSLKLSCAASGFTFNVYAMNWVRQAPGKGLEWVARIRSKYNNYATYYADSVKKRFTISRDDSKNTAYLQMNNLKTEDTAVYYCVRHGNFGNSYLSWWAYWGQGTLVTVSSGGGGSGGGGSGGGGSELVVTQEPSLTVSPGGTVTLTCRSSTGAVTSGYYPNWVQQKPGQAPRGLIGATDMRPSGTPARFSGSLLGGKAALTLSGVQPEDEAEYYCALWYSNRWVFGGGTKLTVL

SEQ ID NO: 324 - DNA, 1500 bp, Artificial Sequence
  MCSP-G4 VH-VL-P x A2J VH-VL-P
caggtgcagctggtccagtctggggctgaggtgaagaggcctggggcctcaatgaaggtctcctgcaaggcttctgggtacaccttcaccaactactatatacactgggtgcgacaggcccctggacaaggtcttgagtggatgggttggatcaaccctaacagtggtgccacaaactatgcacagaagttccagggcagagtcaccatgaccagggacacgtccacgagcacagtctacatggagctgagcagcctgagatctgaggacacggccgtgtattactgtgcgaaatcctgggtctcctggtttgcttcctggggtcaaggaaccttggtcaccgtctcctcaggtggtggtggttctggcggcggcggctccggtggtggtggttctgagctcgtgatgacccagtctccagactccctggctgtgtctctgggcgagagggccaccatcaactgcaagtccagccagagtgttttaaacagctccaacaataggaactacttagcttggtaccagcagaaaccaggacagcctcctaagctgctcatttactgggcatctacccgggaatccggggtccctgaccgattcagtggcagcgggtctgggacagatttcactctcaccatcagtggcctgcaggctgaagatgtggcagtttattactgtcagcaacattatagtactccattcacttttggccctgggaccaaagtggatatcaaatccggaggtggtggatccgaggtgcagctgctcgagtctggaggaggattggtgcagcctggagggtcattgaaactctcatgtgcagcctctggattcaccttcaatgtctacgccatgaactgggtccgccaggctccaggaaagggtttggaatgggttgctcgcataagaagtaaatataataattatgcaacatattatgccgattcagtgaaaaagaggttcaccatctccagagatgattcaaaaaacactgcctatctacaaatgaacaacttgaaaactgaggacactgccgtgtactactgtgtgagacatgggaacttcggtaatagctacttatcctggtgggcttactggggccaagggactctggtcaccgtctcctcaggtggtggtggttctggcggcggcggctccggtggtggtggttctgagctcgttgtgactcaggaaccttcactcaccgtatcacctggtggaacagtcacactcacttgtcgctcctcgactggggctgttacatctggctactacccaaactgggtccaacaaaaaccaggtcaggcaccccgtggtctaataggtgccactgacatgaggccctctggtactcctgccagattctcaggctccctgcttggaggcaaggctgccctcaccctctcaggggtacagccagaggatgaggcagaatattactgtgctctatggtacagcaaccgctgggtgttcggtggaggaaccaaactgactgtccta

SEQ ID NO: 325 - protein, 500 aa, Artificial Sequence
  MCSP-G4 VH-VL-P x E1L VH-VL-P
QVQLVQSGAEVKRPGASMKVSCKASGYTFTNYYIHWVRQAPGQGLEWMGWINPNSGATNYAQKFQGRVTMTRDTSTSTVYMELSSLRSEDTAVYYCAKSWVSWFASWGQGTLVTVSSGGGGSGGGGSGGGGSELVMTQSPDSLAVSLGERATINCKSSQSVLNSSNNRNYLAWYQQKPGQPPKLLIYWASTRESGVPDRFSGSGSGTDFTLTISGLQAEDVAVYYCQQHYSTPFTFGPGTKVDIKSGGGGSEVQLLESGGGLVQPGGSLKLSCAASGFTFNKYAMNWVRQAPGKGLEWVARIRSKYNNYATYYADSVKSRFTISRDDSKNTAYLQMNNLKTEDTAVYYCVRHGNFGNSYTSYYAYWGQGTLVTVSSGGGGSGGGGSGGGGSELVVTQEPSLTVSPGGTVTLTCGSSTGAVTSGYYPNWVQQKPGQAPRGLIGGTKFLAPGTPARFSGSLLGGKAALTLSGVQPEDEAEYYCALWYSNRWVFGGGTKLTVL

SEQ ID NO: 326 - DNA, 1500 bp, Artificial Sequence
  MCSP-G4 VH-VL-P x E1L VH-VL-P
caggtgcagctggtccagtctggggctgaggtgaagaggcctggggcctcaatgaaggtctcctgcaaggcttctgggtacaccttcaccaactactatatacactgggtgcgacaggcccctggacaaggtcttgagtggatgggttggatcaaccctaacagtggtgccacaaactatgcacagaagttccagggcagagtcaccatgaccagggacacgtccacgagcacagtctacatggagctgagcagcctgagatctgaggacacggccgtgtattactgtgcgaaatcctgggtctcctggtttgcttcctggggtcaaggaaccttggtcaccgtctcctcaggtggtggtggttctggcggcggcggctccggtggtggtggttctgagctcgtgatgacccagtctccagactccctggctgtgtctctgggcgagagggccaccatcaactgcaagtccagccagagtgttttaaacagctccaacaataggaactacttagcttggtaccagcagaaaccaggacagcctcctaagctgctcatttactgggcatctacccgggaatccggggtccctgaccgattcagtggcagcgggtctgggacagatttcactctcaccatcagtggcctgcaggctgaagatgtggcagtttattactgtcagcaacattatagtactccattcacttttggccctgggaccaaagtggatatcaaatccggaggtggtggatccgaggtgcagctgctcgagtctggaggaggattggtgcagcctggagggtcattgaaactctcatgtgcagcctctggattcaccttcaataagtacgccatgaactgggtccgccaggctccaggaaagggtttggaatgggttgctcgcataagaagtaaatataataattatgcaacatattatgccgattcagtgaaatcgaggttcaccatctccagagatgattcaaaaaacactgcctatctacaaatgaacaacttgaaaactgaggacactgccgtgtactactgtgtgagacatgggaacttcggtaatagctacacatcctactacgcttactggggccaagggactctggtcaccgtctcctcaggtggtggtggttctggcggcggcggctccggtggtggtggttctgagctcgttgtgactcaggaaccttcactcaccgtatcacctggtggaacagtcacactcacttgtggctcctcgactggggctgttacatctggctactacccaaactgggtccaacaaaaaccaggtcaggcaccccgtggtctaataggtgggactaagttcctcgcccccggtactcctgccagattctcaggctccctgcttggaggcaaggctgccctcaccctctcaggggtacagccagaggatgaggcagaatattactgtgctctatggtacagcaaccgctgggtgttcggtggaggaaccaaactgactgtccta

SEQ ID NO: 327 - protein, 500 aa, Artificial Sequence
  MCSP-G4 VH-VL-P x E2M VH-VL-P
QVQLVQSGAEVKRPGASMKVSCKASGYTFTNYYIHWVRQAPGQGLEWMGWINPNSGATNYAQKFQGRVTMTRDTSTSTVYMELSSLRSEDTAVYYCAKSWVSWFASWGQGTLVTVSSGGGGSGGGGSGGGGSELVMTQSPDSLAVSLGERATINCKSSQSVLNSSNNRNYLAWYQQKPGQPPKLLIYWASTRESGVPDRFSGSGSGTDFTLTISGLQAEDVAVYYCQQHYSTPFTFGPGTKVDIKSGGGGSEVQLLESGGGLVQPGGSLKLSCAASGFTFNGYAMNWVRQAPGKGLEWVARIRSKYNNYATYYADSVKERFTISRDDSKNTAYLQMNNLKTEDTAVYYCVRHRNFGNSYLSWFAYWGQGTLVTVSSGGGGSGGGGSGGGGSELVVTQEPSLTVSPGGTVTLTCRSSTGAVTSGYYPNWVQQKPGQAPRGLIGATDMRPSGTPARFSGSLLGGKAALTLSGVQPEDEAEYYCALWYSNRWVFGGGTKLTVL

SEQ ID NO: 328 - DNA, 1500 bp, Artificial Sequence
  MCSP-G4 VH-VL-P x E2M VH-VL-P
caggtgcagctggtccagtctggggctgaggtgaagaggcctggggcctcaatgaaggtctcctgcaaggcttctgggtacaccttcaccaactactatatacactgggtgcgacaggcccctggacaaggtcttgagtggatgggttggatcaaccctaacagtggtgccacaaactatgcacagaagttccagggcagagtcaccatgaccagggacacgtccacgagcacagtctacatggagctgagcagcctgagatctgaggacacggccgtgtattactgtgcgaaatcctgggtctcctggtttgcttcctggggtcaaggaaccttggtcaccgtctcctcaggtggtggtggttctggcggcggcggctccggtggtggtggttctgagctcgtgatgacccagtctccagactccctggctgtgtctctgggcgagagggccaccatcaactgcaagtccagccagagtgttttaaacagctccaacaataggaactacttagcttggtaccagcagaaaccaggacagcctcctaagctgctcatttactgggcatctacccgggaatccggggtccctgaccgattcagtggcagcgggtctgggacagatttcactctcaccatcagtggcctgcaggctgaagatgtggcagtttattactgtcagcaacattatagtactccattcacttttggccctgggaccaaagtggatatcaaatccggaggtggtggatccgaggtgcagctgctcgagtctggaggaggattggtgcagcctggagggtcattgaaactctcatgtgcagcctctggattcaccttcaatggctacgccatgaactgggtccgccaggctccaggaaagggtttggaatgggttgctcgcataagaagtaaatataataattatgcaacatattatgccgattcagtgaaagagaggttcaccatctccagagatgattcaaaaaacactgcctatctacaaatgaacaacttgaaaactgaggacactgccgtgtactactgtgtgagacataggaacttcggtaatagctacttatcctggttcgcttactggggccaagggactctggtcaccgtctcctcaggtggtggtggttctggcggcggcggctccggtggtggtggttctgagctcgttgtgactcaggaaccttcactcaccgtatcacctggtggaacagtcacactcacttgtcgctcctcgactggggctgttacatctggctactacccaaactgggtccaacaaaaaccaggtcaggcaccccgtggtctaataggtgccactgacatgaggccctctggtactcctgccagattctcaggctccctgcttggaggcaaggctgccctcaccctctcaggggtacagccagaggatgaggcagaatattactgtgctctatggtacagcaaccgctgggtgttcggtggaggaaccaaactgactgtccta

SEQ ID NO: 329 - protein, 500 aa, Artificial Sequence
  MCSP-G4 VH-VL-P x F7O VH-VL-P
QVQLVQSGAEVKRPGASMKVSCKASGYTFTNYYIHWVRQAPGQGLEWMGWINPNSGATNYAQKFQGRVTMTRDTSTSTVYMELSSLRSEDTAVYYCAKSWVSWFASWGQGTLVTVSSGGGGSGGGGSGGGGSELVMTQSPDSLAVSLGERATINCKSSQSVLNSSNNRNYLAWYQQKPGQPPKLLIYWASTRESGVPDRFSGSGSGTDFTLTISGLQAEDVAVYYCQQHYSTPFTFGPGTKVDIKSGGGGSEVQLLESGGGLVQPGGSLKLSCAASGFTFNVYAMNWVRQAPGKGLEWVARIRSKYNNYATYYADSVKKRFTISRDDSKNTAYLQMNNLKTEDTAVYYCVRHGNFGNSYISWWAYWGQGTLVTVSSGGGGSGGGGSGGGGSELVVTQEPSLTVSPGGTVTLTCGSSTGAVTSGYYPNWVQQKPGQAPRGLIGGTKFLAPGTPARFSGSLLGGKAALTLSGVQPEDEAEYYCALWYSNRWVFGGGTKLTVL

SEQ ID NO: 330 - DNA, 1500 bp, Artificial Sequence
  MCSP-G4 VH-VL-P x F7O VH-VL-P
caggtgcagctggtccagtctggggctgaggtgaagaggcctggggcctcaatgaaggtctcctgcaaggcttctgggtacaccttcaccaactactatatacactgggtgcgacaggcccctggacaaggtcttgagtggatgggttggatcaaccctaacagtggtgccacaaactatgcacagaagttccagggcagagtcaccatgaccagggacacgtccacgagcacagtctacatggagctgagcagcctgagatctgaggacacggccgtgtattactgtgcgaaatcctgggtctcctggtttgcttcctggggtcaaggaaccttggtcaccgtctcctcaggtggtggtggttctggcggcggcggctccggtggtggtggttctgagctcgtgatgacccagtctccagactccctggctgtgtctctgggcgagagggccaccatcaactgcaagtccagccagagtgttttaaacagctccaacaataggaactacttagcttggtaccagcagaaaccaggacagcctcctaagctgctcatttactgggcatctacccgggaatccggggtccctgaccgattcagtggcagcgggtctgggacagatttcactctcaccatcagtggcctgcaggctgaagatgtggcagtttattactgtcagcaacattatagtactccattcacttttggccctgggaccaaagtggatatcaaatccggaggtggtggatccgaggtgcagctgctcgagtctggaggaggattggtgcagcctggagggtcattgaaactctcatgtgcagcctctggattcaccttcaatgtgtacgccatgaactgggtccgccaggctccaggaaagggtttggaatgggttgctcgcataagaagtaaatataataattatgcaacatattatgccgattcagtgaaaaagaggttcaccatctccagagatgattcaaaaaacactgcctatctacaaatgaacaacttgaaaactgaggacactgccgtgtactactgtgtgagacatgggaacttcggtaatagctacatatcctggtgggcttactggggccaagggactctggtcaccgtctcctcaggtggtggtggttctggcggcggcggctccggtggtggtggttctgagctcgttgtgactcaggaaccttcactcaccgtatcacctggtggaacagtcacactcacttgtggctcctcgactggggctgttacatctggctactacccaaactgggtccaacaaaaaccaggtcaggcaccccgtggtctaataggtgggactaagttcctcgcccccggtactcctgccagattctcaggctccctgcttggaggcaaggctgccctcaccctctcaggggtacagccagaggatgaggcagaatattactgtgctctatggtacagcaaccgctgggtgttcggtggaggaaccaaactgactgtccta

SEQ ID NO: 331 - protein, 500 aa, Artificial Sequence
  MCSP-G4 VH-VL-P x F12Q VH-VL
QVQLVQSGAEVKRPGASMKVSCKASGYTFTNYYIHWVRQAPGQGLEWMGWINPNSGATNYAQKFQGRVTMTRDTSTSTVYMELSSLRSEDTAVYYCAKSWVSWFASWGQGTLVTVSSGGGGSGGGGSGGGGSELVMTQSPDSLAVSLGERATINCKSSQSVLNSSNNRNYLAWYQQKPGQPPKLLIYWASTRESGVPDRFSGSGSGTDFTLTISGLQAEDVAVYYCQQHYSTPFTFGPGTKVDIKSGGGGSEVQLVESGGGLVQPGGSLKLSCAASGFTFNSYAMNWVRQAPGKGLEWVARIRSKYNNYATYYADSVKGRFTISRDDSKNTAYLQMNNLKTEDTAVYYCVRHGNFGNSYVSWWAYWGQGTLVTVSSGGGGSGGGGSGGGGSQTVVTQEPSLTVSPGGTVTLTCGSSTGAVTSGNYPNWVQQKPGQAPRGLIGGTKFLAPGTPARFSGSLLGGKAALTLSGVQPEDEAEYYCVLWYSNRWVFGGGTKLTVL

SEQ ID NO: 332 - DNA, 1500 bp, Artificial Sequence
  MCSP-G4 VH-VL-P x F12Q VH-VL
caggtgcagctggtccagtctggggctgaggtgaagaggcctggggcctcaatgaaggtctcctgcaaggcttctgggtacaccttcaccaactactatatacactgggtgcgacaggcccctggacaaggtcttgagtggatgggttggatcaaccctaacagtggtgccacaaactatgcacagaagttccagggcagagtcaccatgaccagggacacgtccacgagcacagtctacatggagctgagcagcctgagatctgaggacacggccgtgtattactgtgcgaaatcctgggtctcctggtttgcttcctggggtcaaggaaccttggtcaccgtctcctcaggtggtggtggttctggcggcggcggctccggtggtggtggttctgagctcgtgatgacccagtctccagactccctggctgtgtctctgggcgagagggccaccatcaactgcaagtccagccagagtgttttaaacagctccaacaataggaactacttagcttggtaccagcagaaaccaggacagcctcctaagctgctcatttactgggcatctacccgggaatccggggtccctgaccgattcagtggcagcgggtctgggacagatttcactctcaccatcagtggcctgcaggctgaagatgtggcagtttattactgtcagcaacattatagtactccattcacttttggccctgggaccaaagtggatatcaaatccggaggtggtggatccgaggtgcagctggtcgagtctggaggaggattggtgcagcctggagggtcattgaaactctcatgtgcagcctctggattcaccttcaatagctacgccatgaactgggtccgccaggctccaggaaagggtttggaatgggttgctcgcataagaagtaaatataataattatgcaacatattatgccgattcagtgaaaggcaggttcaccatctccagagatgattcaaaaaacactgcctatctacaaatgaacaacttgaaaactgaggacactgccgtgtactactgtgtgagacatgggaacttcggtaatagctacgtttcctggtgggcttactggggccaagggactctggtcaccgtctcctcaggtggtggtggttctggcggcggcggctccggtggtggtggttctcagactgttgtgactcaggaaccttcactcaccgtatcacctggtggaacagtcacactcacttgtggctcctcgactggggctgttacatctggcaactacccaaactgggtccaacaaaaaccaggtcaggcaccccgtggtctaataggtgggactaagttcctcgcccccggtactcctgccagattctcaggctccctgcttggaggcaaggctgccctcaccctctcaggggtacagccagaggatgaggcagaatattactgtgttctatggtacagcaaccgctgggtgttcggtggaggaaccaaactgactgtccta

SEQ ID NO: 333 - protein, 500 aa, Artificial Sequence
  MCSP-G4 VH-VL-P x I2C VH-VL
QVQLVQSGAEVKRPGASMKVSCKASGYTFTNYYIHWVRQAPGQGLEWMGWINPNSGATNYAQKFQGRVTMTRDTSTSTVYMELSSLRSEDTAVYYCAKSWVSWFASWGQGTLVTVSSGGGGSGGGGSGGGGSELVMTQSPDSLAVSLGERATINCKSSQSVLNSSNNRNYLAWYQQKPGQPPKLLIYWASTRESGVPDRFSGSGSGTDFTLTISGLQAEDVAVYYCQQHYSTPFTFGPGTKVDIKSGGGGSEVQLVESGGGLVQPGGSLKLSCAASGFTFNKYAMNWVRQAPGKGLEWVARIRSKYNNYATYYADSVKDRFTISRDDSKNTAYLQMNNLKTEDTAVYYCVRHGNFGNSYISYWAYWGQGTLVTVSSGGGGSGGGGSGGGGSQTVVTQEPSLTVSPGGTVTLTCGSSTGAVTSGNYPNWVQQKPGQAPRGLIGGTKFLAPGTPARFSGSLLGGKAALTLSGVQPEDEAEYYCVLWYSNRWVFGGGTKLTVL

SEQ ID NO: 334 - DNA, 1500 bp, Artificial Sequence
  MCSP-G4 VH-VL-P x I2C VH-VL
caggtgcagctggtccagtctggggctgaggtgaagaggcctggggcctcaatgaaggtctcctgcaaggcttctgggtacaccttcaccaactactatatacactgggtgcgacaggcccctggacaaggtcttgagtggatgggttggatcaaccctaacagtggtgccacaaactatgcacagaagttccagggcagagtcaccatgaccagggacacgtccacgagcacagtctacatggagctgagcagcctgagatctgaggacacggccgtgtattactgtgcgaaatcctgggtctcctggtttgcttcctggggtcaaggaaccttggtcaccgtctcctcaggtggtggtggttctggcggcggcggctccggtggtggtggttctgagctcgtgatgacccagtctccagactccctggctgtgtctctgggcgagagggccaccatcaactgcaagtccagccagagtgttttaaacagctccaacaataggaactacttagcttggtaccagcagaaaccaggacagcctcctaagctgctcatttactgggcatctacccgggaatccggggtccctgaccgattcagtggcagcgggtctgggacagatttcactctcaccatcagtggcctgcaggctgaagatgtggcagtttattactgtcagcaacattatagtactccattcacttttggccctgggaccaaagtggatatcaaatccggaggtggtggatccgaggtgcagctggtcgagtctggaggaggattggtgcagcctggagggtcattgaaactctcatgtgcagcctctggattcaccttcaataagtacgccatgaactgggtccgccaggctccaggaaagggtttggaatgggttgctcgcataagaagtaaatataataattatgcaacatattatgccgattcagtgaaagacaggttcaccatctccagagatgattcaaaaaacactgcctatctacaaatgaacaacttgaaaactgaggacactgccgtgtactactgtgtgagacatgggaacttcggtaatagctacatatcctactgggcttactggggccaagggactctggtcaccgtctcctcaggtggtggtggttctggcggcggcggctccggtggtggtggttctcagactgttgtgactcaggaaccttcactcaccgtatcacctggtggaacagtcacactcacttgtggctcctcgactggggctgttacatctggcaactacccaaactgggtccaacaaaaaccaggtcaggcaccccgtggtctaataggtgggactaagttcctcgcccccggtactcctgccagattctcaggctccctgcttggaggcaaggctgccctcaccctctcaggggtacagccagaggatgaggcagaatattactgtgttctatggtacagcaaccgctgggtgttcggtggaggaaccaaactgactgtccta

SEQ ID NO: 335 - protein, 500 aa, Artificial Sequence
  MCSP-D2 VH-VL x H2C VH-VL
QVQLVQSGAEVKKPGASVKVSCKASGYTFTGYYMHWVRQAPGQGLEWMGWINPNSGGTSYAQKFQGRVTMTRDTSTSTVYMELSNLRSDDTAVYYCAKSWVSWFASWGQGTLVTVSSGGGGSGGGGSGGGGSDIVMTQSPDSLAVSLGERATINCKSSQSVLNSSNNRNYLAWYQQKPGQPPKLLIYWASTRESGVPDRFSGSGSGTDFTLTISGLQAEDVAVYYCQQHYSTPFTFGPGTKVDIKSGGGGSEVQLVESGGGLVQPGGSLKLSCAASGFTFNKYAMNWVRQAPGKGLEWVARIRSKYNNYATYYADSVKDRFTISRDDSKNTAYLQMNNLKTEDTAVYYCVRHGNFGNSYISYWAYWGQGTLVTVSSGGGGSGGGGSGGGGSQTVVTQEPSLTVSPGGTVTLTCGSSTGAVTSGYYPNWVQQKPGQAPRGLIGGTKFLAPGTPARFSGSLLGGKAALTLSGVQPEDEAEYYCALWYSNRWVFGGGTKLTVL

SEQ ID NO: 336 - DNA, 1500 bp, Artificial Sequence
  MCSP-D2 VH-VL x H2C VH-VL
caggtgcagctggtccagtctggggctgaggtgaagaagcctggggcctcagtgaaggtctcctgcaaggcttctggatacaccttcaccggctactatatgcactgggtgcgacaggcccctggacaagggcttgagtggatgggatggatcaaccctaacagtggtggcacaagctacgcacagaagttccagggcagagtcaccatgactagggacacgtccacgagcacagtctacatggagctgagcaacctgagatctgacgacacggccgtgtattactgtgcgaaatcctgggtctcctggtttgcttcctggggtcaaggaaccttggtcaccgtctcctcaggtggtggtggttctggcggcggcggctccggtggtggtggttctgatatcgtgatgacccagtctccagactccctggctgtgtctctgggcgagagggccaccatcaactgcaagtccagccagagtgttttaaacagctccaacaataggaactacttagcttggtaccagcagaaaccaggacagcctcctaagctgctcatttactgggcatctacccgggaatccggggtccctgaccgattcagtggcagcgggtctgggacagatttcactctcaccatcagtggcctgcaggctgaagatgtggcagtttattactgtcagcaacattatagtactccattcacttttggccctgggaccaaagtggatatcaaatccggaggtggtggatccgaggtgcagctggtcgagtctggaggaggattggtgcagcctggagggtcattgaaactctcatgtgcagcctctggattcaccttcaataagtacgccatgaactgggtccgccaggctccaggaaagggtttggaatgggttgctcgcataagaagtaaatataataattatgcaacatattatgccgattcagtgaaagacaggttcaccatctccagagatgattcaaaaaacactgcctatctacaaatgaacaacttgaaaactgaggacactgccgtgtactactgtgtgagacatgggaacttcggtaatagctacatatcctactgggcttactggggccaagggactctggtcaccgtctcctcaggtggtggtggttctggcggcggcggctccggtggtggtggttctcagactgttgtgactcaggaaccttcactcaccgtatcacctggtggaacagtcacactcacttgtggctcctcgactggggctgttacatctggctactacccaaactgggtccaacaaaaaccaggtcaggcaccccgtggtctaataggtgggactaagttcctcgcccccggtactcctgccagattctcaggctccctgcttggaggcaaggctgccctcaccctctcaggggtacagccagaggatgaggcagaatattactgtgctctatggtacagcaaccgctgggtgttcggtggaggaaccaaactgactgtccta

SEQ ID NO: 337 - protein, 500 aa, Artificial Sequence
  MCSP-D2 VH-VL x F12Q VH-VL
QVQLVQSGAEVKKPGASVKVSCKASGYTFTGYYMHWVRQAPGQGLEWMGWINPNSGGTSYAQKFQGRVTMTRDTSTSTVYMELSNLRSDDTAVYYCAKSWVSWFASWGQGTLVTVSSGGGGSGGGGSGGGGSDIVMTQSPDSLAVSLGERATINCKSSQSVLNSSNNRNYLAWYQQKPGQPPKLLIYWASTRESGVPDRFSGSGSGTDFTLTISGLQAEDVAVYYCQQHYSTPFTFGPGTKVDIKSGGGGSEVQLVESGGGLVQPGGSLKLSCAASGFTFNSYAMNWVRQAPGKGLEWVARIRSKYNNYATYYADSVKGRFTISRDDSKNTAYLQMNNLKTEDTAVYYCVRHGNFGNSYVSWWAYWGQGTLVTVSSGGGGSGGGGSGGGGSQTVVTQEPSLTVSPGGTVTLTCGSSTGAVTSGNYPNWVQQKPGQAPRGLIGGTKFLAPGTPARFSGSLLGGKAALTLSGVQPEDEAEYYCVLWYSNRWVFGGGTKLTVL

SEQ ID NO: 338 - DNA, 1500 bp, Artificial Sequence
  MCSP-D2 VH-VL x F12Q VH-VL
caggtgcagctggtccagtctggggctgaggtgaagaagcctggggcctcagtgaaggtctcctgcaaggcttctggatacaccttcaccggctactatatgcactgggtgcgacaggcccctggacaagggcttgagtggatgggatggatcaaccctaacagtggtggcacaagctacgcacagaagttccagggcagagtcaccatgactagggacacgtccacgagcacagtctacatggagctgagcaacctgagatctgacgacacggccgtgtattactgtgcgaaatcctgggtctcctggtttgcttcctggggtcaaggaaccttggtcaccgtctcctcaggtggtggtggttctggcggcggcggctccggtggtggtggttctgatatcgtgatgacccagtctccagactccctggctgtgtctctgggcgagagggccaccatcaactgcaagtccagccagagtgttttaaacagctccaacaataggaactacttagcttggtaccagcagaaaccaggacagcctcctaagctgctcatttactgggcatctacccgggaatccggggtccctgaccgattcagtggcagcgggtctgggacagatttcactctcaccatcagtggcctgcaggctgaagatgtggcagtttattactgtcagcaacattatagtactccattcacttttggccctgggaccaaagtggatatcaaatccggaggtggtggatccgaggtgcagctggtcgagtctggaggaggattggtgcagcctggagggtcattgaaactctcatgtgcagcctctggattcaccttcaatagctacgccatgaactgggtccgccaggctccaggaaagggtttggaatgggttgctcgcataagaagtaaatataataattatgcaacatattatgccgattcagtgaaaggcaggttcaccatctccagagatgattcaaaaaacactgcctatctacaaatgaacaacttgaaaactgaggacactgccgtgtactactgtgtgagacatgggaacttcggtaatagctacgtttcctggtgggcttactggggccaagggactctggtcaccgtctcctcaggtggtggtggttctggcggcggcggctccggtggtggtggttctcagactgttgtgactcaggaaccttcactcaccgtatcacctggtggaacagtcacactcacttgtggctcctcgactggggctgttacatctggcaactacccaaactgggtccaacaaaaaccaggtcaggcaccccgtggtctaataggtgggactaagttcctcgcccccggtactcctgccagattctcaggctccctgcttggaggcaaggctgccctcaccctctcaggggtacagccagaggatgaggcagaatattactgtgttctatggtacagcaaccgctgggtgttcggtggaggaaccaaactgactgtccta

SEQ ID NO: 339 - protein, 500 aa, Artificial Sequence
  MCSP-D2 VH-VL x I2C VH-VL
QVQLVQSGAEVKKPGASVKVSCKASGYTFTGYYMHWVRQAPGQGLEWMGWINPNSGGTSYAQKFQGRVTMTRDTSTSTVYMELSNLRSDDTAVYYCAKSWVSWFASWGQGTLVTVSSGGGGSGGGGSGGGGSDIVMTQSPDSLAVSLGERATINCKSSQSVLNSSNNRNYLAWYQQKPGQPPKLLIYWASTRESGVPDRFSGSGSGTDFTLTISGLQAEDVAVYYCQQHYSTPFTFGPGTKVDIKSGGGGSEVQLVESGGGLVQPGGSLKLSCAASGFTFNKYAMNWVRQAPGKGLEWVARIRSKYNNYATYYADSVKDRFTISRDDSKNTAYLQMNNLKTEDTAVYYCVRHGNFGNSYISYWAYWGQGTLVTVSSGGGGSGGGGSGGGGSQTVVTQEPSLTVSPGGTVTLTCGSSTGAVTSGNYPNWVQQKPGQAPRGLIGGTKFLAPGTPARFSGSLLGGKAALTLSGVQPEDEAEYYCVLWYSNRWVFGGGTKLTVL

SEQ ID NO: 340 - DNA, 1500 bp, Artificial Sequence
  MCSP-D2 VH-VL x I2C VH-VL
caggtgcagctggtccagtctggggctgaggtgaagaagcctggggcctcagtgaaggtctcctgcaaggcttctggatacaccttcaccggctactatatgcactgggtgcgacaggcccctggacaagggcttgagtggatgggatggatcaaccctaacagtggtggcacaagctacgcacagaagttccagggcagagtcaccatgactagggacacgtccacgagcacagtctacatggagctgagcaacctgagatctgacgacacggccgtgtattactgtgcgaaatcctgggtctcctggtttgcttcctggggtcaaggaaccttggtcaccgtctcctcaggtggtggtggttctggcggcggcggctccggtggtggtggttctgatatcgtgatgacccagtctccagactccctggctgtgtctctgggcgagagggccaccatcaactgcaagtccagccagagtgttttaaacagctccaacaataggaactacttagcttggtaccagcagaaaccaggacagcctcctaagctgctcatttactgggcatctacccgggaatccggggtccctgaccgattcagtggcagcgggtctgggacagatttcactctcaccatcagtggcctgcaggctgaagatgtggcagtttattactgtcagcaacattatagtactccattcacttttggccctgggaccaaagtggatatcaaatccggaggtggtggatccgaggtgcagctggtcgagtctggaggaggattggtgcagcctggagggtcattgaaactctcatgtgcagcctctggattcaccttcaataagtacgccatgaactgggtccgccaggctccaggaaagggtttggaatgggttgctcgcataagaagtaaatataataattatgcaacatattatgccgattcagtgaaagacaggttcaccatctccagagatgattcaaaaaacactgcctatctacaaatgaacaacttgaaaactgaggacactgccgtgtactactgtgtgagacatgggaacttcggtaatagctacatatcctactgggcttactggggccaagggactctggtcaccgtctcctcaggtggtggtggttctggcggcggcggctccggtggtggtggttctcagactgttgtgactcaggaaccttcactcaccgtatcacctggtggaacagtcacactcacttgtggctcctcgactggggctgttacatctggcaactacccaaactgggtccaacaaaaaccaggtcaggcaccccgtggtctaataggtgggactaagttcctcgcccccggtactcctgccagattctcaggctccctgcttggaggcaaggctgccctcaccctctcaggggtacagccagaggatgaggcagaatattactgtgttctatggtacagcaaccgctgggtgttcggtggaggaaccaaactgactgtccta

SEQ ID NO: 341 - protein, 500 aa, Artificial Sequence
  MCSP-D2 VH-VL-P x H2C VH-VL-P
QVQLVQSGAEVKKPGASVKVSCKASGYTFTGYYMHWVRQAPGQGLEWMGWINPNSGGTSYAQKFQGRVTMTRDTSTSTVYMELSNLRSDDTAVYYCAKSWVSWFASWGQGTLVTVSSGGGGSGGGGSGGGGSELVMTQSPDSLAVSLGERATINCKSSQSVLNSSNNRNYLAWYQQKPGQPPKLLIYWASTRESGVPDRFSGSGSGTDFTLTISGLQAEDVAVYYCQQHYSTPFTFGPGTKVDIKSGGGGSEVQLLESGGGLVQPGGSLKLSCAASGFTFNKYAMNWVRQAPGKGLEWVARIRSKYNNYATYYADSVKDRFTISRDDSKNTAYLQMNNLKTEDTAVYYCVRHGNFGNSYISYWAYWGQGTLVTVSSGGGGSGGGGSGGGGSELVVTQEPSLTVSPGGTVTLTCGSSTGAVTSGYYPNWVQQKPGQAPRGLIGGTKFLAPGTPARFSGSLLGGKAALTLSGVQPEDEAEYYCALWYSNRWVFGGGTKLTVL

SEQ ID NO: 342 - DNA, 1500 bp, Artificial Sequence
  MCSP-D2 VH-VL-P x H2C VH-VL-P
caggtgcagctggtccagtctggggctgaggtgaagaagcctggggcctcagtgaaggtctcctgcaaggcttctggatacaccttcaccggctactatatgcactgggtgcgacaggcccctggacaagggcttgagtggatgggatggatcaaccctaacagtggtggcacaagctacgcacagaagttccagggcagagtcaccatgactagggacacgtccacgagcacagtctacatggagctgagcaacctgagatctgacgacacggccgtgtattactgtgcgaaatcctgggtctcctggtttgcttcctggggtcaaggaaccttggtcaccgtctcctcaggtggtggtggttctggcggcggcggctccggtggtggtggttctgagctcgtgatgacccagtctccagactccctggctgtgtctctgggcgagagggccaccatcaactgcaagtccagccagagtgttttaaacagctccaacaataggaactacttagcttggtaccagcagaaaccaggacagcctcctaagctgctcatttactgggcatctacccgggaatccggggtccctgaccgattcagtggcagcgggtctgggacagatttcactctcaccatcagtggcctgcaggctgaagatgtggcagtttattactgtcagcaacattatagtactccattcacttttggccctgggaccaaagtggatatcaaatccggaggtggtggatccgaggtgcagctgctcgagtctggaggaggattggtgcagcctggagggtcattgaaactctcatgtgcagcctctggattcaccttcaataagtacgccatgaactgggtccgccaggctccaggaaagggtttggaatgggttgctcgcataagaagtaaatataataattatgcaacatattatgccgattcagtgaaagacaggttcaccatctccagagatgattcaaaaaacactgcctatctacaaatgaacaacttgaaaactgaggacactgccgtgtactactgtgtgagacatgggaacttcggtaatagctacatatcctactgggcttactggggccaagggactctggtcaccgtctcctcaggtggtggtggttctggcggcggcggctccggtggtggtggttctgagctcgttgtgactcaggaaccttcactcaccgtatcacctggtggaacagtcacactcacttgtggctcctcgactggggctgttacatctggctactacccaaactgggtccaacaaaaaccaggtcaggcaccccgtggtctaataggtgggactaagttcctcgcccccggtactcctgccagattctcaggctccctgcttggaggcaaggctgccctcaccctctcaggggtacagccagaggatgaggcagaatattactgtgctctatggtacagcaaccgctgggtgttcggtggaggaaccaaactgactgtccta

SEQ ID NO: 343 - protein, 499 aa, Artificial Sequence
  MCSP-F9 VH-VL x H2C VH-VL
QVQLQESGPGLVKPSETLSLTCVVSGGSISSSNWWSWVRQPPGKGLEWLGTIYYNGNTYYNPSLKSRVTISVDTSKNQFSLRLSSVTAADTAVYYCAKSWVSWFASWGQGTLVTVSSGGGGSGGGGSGGGGSDIVMTQSPDSLAVSLGERATINCKSSQSVLSSSNNKNYLNWYQQKPGQPPKLLIYWASTRESGVPDRFSGSGSGTDFTLTISSLQAEDVAVYYCQQHYSVPFTFGPGTKVDIKGGGGSEVQLVESGGGLVQPGGSLKLSCAASGFTFNKYAMNWVRQAPGKGLEWVARIRSKYNNYATYYADSVKDRFTISRDDSKNTAYLQMNNLKTEDTAVYYCVRHGNFGNSYISYWAYWGQGTLVTVSSGGGGSGGGGSGGGGSQTVVTQEPSLTVSPGGTVTLTCGSSTGAVTSGYYPNWVQQKPGQAPRGLIGGTKFLAPGTPARFSGSLLGGKAALTLSGVQPEDEAEYYCALWYSNRWVFGGGTKLTVL

SEQ ID NO: 344 - DNA, 1497 bp, Artificial Sequence
  MCSP-F9 VH-VL x H2C VH-VL
caggtgcagctgcaagagtctggcccaggactggtgaagccttcggagaccctgtccctcacctgcgttgtctctggtggctccatcagcagtagtaactggtggagctgggtccgccagcccccagggaagggactggagtggcttgggactatctattataatgggaatacctactacaacccgtccctcaagagtcgagtcaccatctccgtagacacgtccaagaaccagttctccctgaggctgagctctgtgaccgccgcagacacggccgtgtattactgtgcgaaatcctgggtctcctggtttgcttcctggggtcaaggaaccttggtcaccgtctcctcaggtggtggtggttctggcggcggcggctccggtggtggtggttctgatatcgtgatgacacagtctccagactccctggctgtgtctctgggcgagagggccaccatcaactgcaagtccagccagagtgtcttatccagctccaacaataagaactacttaaattggtaccagcagaaaccaggacagcctcctaagttgctcatttactgggcatctacccgggaatccggggtccctgaccgattcagtggcagcgggtctgggacagatttcactctcaccatcagcagcctgcaggctgaagatgtggcagtttattactgtcagcaacattatagtgttccattcactttcggccctgggaccaaagtggatatcaaaggaggtggtggctccgaggtgcagctggtcgagtctggaggaggattggtgcagcctggagggtcattgaaactctcatgtgcagcctctggattcaccttcaataagtacgccatgaactgggtccgccaggctccaggaaagggtttggaatgggttgctcgcataagaagtaaatataataattatgcaacatattatgccgattcagtgaaagacaggttcaccatctccagagatgattcaaaaaacactgcctatctacaaatgaacaacttgaaaactgaggacactgccgtgtactactgtgtgagacatgggaacttcggtaatagctacatatcctactgggcttactggggccaagggactctggtcaccgtctcctcaggtggtggtggttctggcggcggcggctccggtggtggtggttctcagactgttgtgactcaggaaccttcactcaccgtatcacctggtggaacagtcacactcacttgtggctcctcgactggggctgttacatctggctactacccaaactgggtccaacaaaaaccaggtcaggcaccccgtggtctaataggtgggactaagttcctcgcccccggtactcctgccagattctcaggctccctgcttggaggcaaggctgccctcaccctctcaggggtacagccagaggatgaggcagaatattactgtgctctatggtacagcaaccgctgggtgttcggtggaggaaccaaactgactgtccta

SEQ ID NO: 345 - protein, 500 aa, Artificial Sequence
  MCSP-F9 VH-VL-P x H2C VH-VL-P
EVQLQESGPGLVKPSETLSLTCVVSGGSISSSNWWSWVRQPPGKGLEWLGTIYYNGNTYYNPSLKSRVTISVDTSKNQFSLRLSSVTAADTAVYYCAKSWVSWFASWGQGTLVTVSSGGGGSGGGGSGGGGSELVMTQSPDSLAVSLGERATINCKSSQSVLSSSNNKNYLNWYQQKPGQPPKLLIYWASTRESGVPDRFSGSGSGTDFTLTISSLQAEDVAVYYCQQHYSVPFTFGPGTKVDIKSGGGGSEVQLLESGGGLVQPGGSLKLSCAASGFTFNKYAMNWVRQAPGKGLEWVARIRSKYNNYATYYADSVKDRFTISRDDSKNTAYLQMNNLKTEDTAVYYCVRHGNFGNSYISYWAYWGQGTLVTVSSGGGGSGGGGSGGGGSELVVTQEPSLTVSPGGTVTLTCGSSTGAVTSGYYPNWVQQKPGQAPRGLIGGTKFLAPGTPARFSGSLLGGKAALTLSGVQPEDEAEYYCALWYSNRWVFGGGTKLTVL

SEQ ID NO: 346 - DNA, 1500 bp, Artificial Sequence
  MCSP-F9 VH-VL-P x H2C VH-VL-P
gaggtgcagctgcaagagtctggcccaggactggtgaagccttcggagaccctgtccctcacctgcgttgtctctggtggctccatcagcagtagtaactggtggagctgggtccgccagcccccagggaagggactggagtggcttgggactatctattataatgggaatacctactacaacccgtccctcaagagtcgagtcaccatctccgtagacacgtccaagaaccagttctccctgaggctgagctctgtgaccgccgcagacacggccgtgtattactgtgcgaaatcctgggtctcctggtttgcttcctggggtcaaggaaccttggtcaccgtctcctcaggtggtggtggttctggcggcggcggctccggtggtggtggttctgagctcgtgatgacacagtctccagactccctggctgtgtctctgggcgagagggccaccatcaactgcaagtccagccagagtgtcttatccagctccaacaataagaactacttaaattggtaccagcagaaaccaggacagcctcctaagttgctcatttactgggcatctacccgggaatccggggtccctgaccgattcagtggcagcgggtctgggacagatttcactctcaccatcagcagcctgcaggctgaagatgtggcagtttattactgtcagcaacattatagtgttccattcactttcggccctgggaccaaagtggatatcaaatccggaggtggtggatccgaggtgcagctgctcgagtctggaggaggattggtgcagcctggagggtcattgaaactctcatgtgcagcctctggattcaccttcaataagtacgccatgaactgggtccgccaggctccaggaaagggtttggaatgggttgctcgcataagaagtaaatataataattatgcaacatattatgccgattcagtgaaagacaggttcaccatctccagagatgattcaaaaaacactgcctatctacaaatgaacaacttgaaaactgaggacactgccgtgtactactgtgtgagacatgggaacttcggtaatagctacatatcctactgggcttactggggccaagggactctggtcaccgtctcctcaggtggtggtggttctggcggcggcggctccggtggtggtggttctgagctcgttgtgactcaggaaccttcactcaccgtatcacctggtggaacagtcacactcacttgtggctcctcgactggggctgttacatctggctactacccaaactgggtccaacaaaaaccaggtcaggcaccccgtggtctaataggtgggactaagttcctcgcccccggtactcctgccagattctcaggctccctgcttggaggcaaggctgccctcaccctctcaggggtacagccagaggatgaggcagaatattactgtgctctatggtacagcaaccgctgggtgttcggtggaggaaccaaactgactgtccta

SEQ ID NO: 347 - protein, 500 aa, Artificial Sequence
  MCSP-F9 VH-VL-P x G4H VH-VL-P
EVQLQESGPGLVKPSETLSLTCVVSGGSISSSNWWSWVRQPPGKGLEWLGTIYYNGNTYYNPSLKSRVTISVDTSKNQFSLRLSSVTAADTAVYYCAKSWVSWFASWGQGTLVTVSSGGGGSGGGGSGGGGSELVMTQSPDSLAVSLGERATINCKSSQSVLSSSNNKNYLNWYQQKPGQPPKLLIYWASTRESGVPDRFSGSGSGTDFTLTISSLQAEDVAVYYCQQHYSVPFTFGPGTKVDIKSGGGGSEVQLLESGGGLVQPGGSLKLSCAASGFTFNRYAMNWVRQAPGKGLEWVARIRSKYNNYATYYADSVKGRFTISRDDSKNTAYLQMNNLKTEDTAVYYCVRHGNFGNSYLSYFAYWGQGTLVTVSSGGGGSGGGGSGGGGSELVVTQEPSLTVSPGGTVTLTCGSSTGAVTSGYYPNWVQQKPGQAPRGLIGGTKFLAPGTPARFSGSLLGGKAALTLSGVQPEDEAEYYCALWYSNRWVFGGGTKLTVL

SEQ ID NO: 348 - DNA, 1500 bp, Artificial Sequence
  MCSP-F9 VH-VL-P x G4H VH-VL-P
gaggtgcagctgcaagagtctggcccaggactggtgaagccttcggagaccctgtccctcacctgcgttgtctctggtggctccatcagcagtagtaactggtggagctgggtccgccagcccccagggaagggactggagtggcttgggactatctattataatgggaatacctactacaacccgtccctcaagagtcgagtcaccatctccgtagacacgtccaagaaccagttctccctgaggctgagctctgtgaccgccgcagacacggccgtgtattactgtgcgaaatcctgggtctcctggtttgcttcctggggtcaaggaaccttggtcaccgtctcctcaggtggtggtggttctggcggcggcggctccggtggtggtggttctgagctcgtgatgacacagtctccagactccctggctgtgtctctgggcgagagggccaccatcaactgcaagtccagccagagtgtcttatccagctccaacaataagaactacttaaattggtaccagcagaaaccaggacagcctcctaagttgctcatttactgggcatctacccgggaatccggggtccctgaccgattcagtggcagcgggtctgggacagatttcactctcaccatcagcagcctgcaggctgaagatgtggcagtttattactgtcagcaacattatagtgttccattcactttcggccctgggaccaaagtggatatcaaatccggaggtggtggatccgaggtgcagctgctcgagtctggaggaggattggtgcagcctggagggtcattgaaactctcatgtgcagcctctggattcaccttcaatcgctacgccatgaactgggtccgccaggctccaggaaagggtttggaatgggttgctcgcataagaagtaaatataataattatgcaacatattatgccgattcagtgaaagggaggttcaccatctccagagatgattcaaaaaacactgcctatctacaaatgaacaacttgaaaactgaggacactgccgtgtactactgtgtgagacatgggaacttcggtaatagctacttatcctacttcgcttactggggccaagggactctggtcaccgtctcctcaggtggtggtggttctggcggcggcggctccggtggtggtggttctgagctcgttgtgactcaggaaccttcactcaccgtatcacctggtggaacagtcacactcacttgtggctcctcgactggggctgttacatctggctactacccaaactgggtccaacaaaaaccaggtcaggcaccccgtggtctaataggtgggactaagttcctcgcccccggtactcctgccagattctcaggctccctgcttggaggcaaggctgccctcaccctctcaggggtacagccagaggatgaggcagaatattactgtgctctatggtacagcaaccgctgggtgttcggtggaggaaccaaactgactgtccta

SEQ ID NO: 349 - protein, 267 aa, Artificial Sequence
  1-27 CD3epsilon-Fc
QDGNEEMGGITQTPYKVSISGTTVILTSGEPKSCDKTHTCPPCPAPELLGGPSVFLFPPKPKDTLMISRTPEVTCVVVDVSHEDPEVKFNWYVDGVEVHNAKTKPREEQYNSTYRVVSVLTVLHQDWLNGKEYKCKVSNKALPAPIEKTISKAKGQPREPQVYTLPPSREEMTKNQVSLTCLVKGFYPSDIAVEWESNGQPENNYKTTPPVLDSDGSFFLYSKLTVDKSRWQQGNVFSCSVMHEALHNHYTQKSLSLSPGKHHHHHH

SEQ ID NO: 350 - DNA, 858 bp, Artificial Sequence
  1-27 CD3epsilon-Fc
atgggatggagctgtatcatcctcttcttggtagcaacagctacaggtgtacactcccaagatggtaatgaagaaatgggtggtattacacagacaccatataaagtctccatctctggaaccacagtaatattgacatccggagagcccaaatcttgtgacaaaactcacacatgcccaccgtgcccagcacctgaactcctggggggaccgtcagtcttcctcttccccccaaaacccaaggacaccctcatgatctcccggacccctgaggtcacatgcgtggtggtggacgtgagccacgaagaccctgaggtcaagttcaactggtacgtggacggcgtggaggtgcataatgccaagacaaagccgcgggaggagcagtacaacagcacgtaccgtgtggtcagcgtcctcaccgtcctgcaccaggactggctgaatggcaaggagtacaagtgcaaggtctccaacaaagccctcccagcccccatcgagaaaaccatctccaaagccaaagggcagccccgagaaccacaggtgtacaccctgcccccatcccgggaggagatgaccaagaaccaggtcagcctgacctgcctggtcaaaggcttctatcccagcgacatcgccgtggagtgggagagcaatgggcagccggagaacaactacaagaccacgcctcccgtgctggactccgacggctccttcttcctctatagcaagctcaccgtggacaagagcaggtggcagcaggggaacgtcttctcatgctccgtgatgcatgaggctctgcacaaccactacacgcagaagagcctctccctgtccccgggtaaacatcatcaccatcatcat

SEQ ID NO: 351 - protein, 333 aa, Artificial Sequence
  human 1-27 CD3epsilon-EpCAM
QDGNEEMGGITQTPYKVSISGTTVILTDYKDDDDKTASFAAAQKECVCENYKLAVNCFLNDNGQCQCTSIGAQNTVLCSKLAAKCLVMKAEMNGSKLGRRAKPEGALQNNDGLYDPDCDESGLFKAKQCNGTSTCWCVNTAGVRRTDKDTEITCSERVRTYWIIIELKHKAREKPYDVQSLRTALEEAIKTRYQLDPKFITNILYEDNVITIDLVQNSSQKTQNDVDIADVAYYFEKDVKGESLFHSKKMDLRVNGEQLDLDPGQTLIYYVDEKAPEFSMQGLKAGVIAVIVVVVIAIVAGIVVLVISRKKRMAKYEKAEIKEMGEMHRELNA

SEQ ID NO: 352 - DNA, 1056 bp, Artificial Sequence
  human 1-27 CD3epsilon-EpCAM
atgggatggagctgtatcatcctcttcttggtagcaacagctacaggtgtacactcccaagatggtaatgaagaaatgggtggtattacacagacaccatataaagtctccatctctggaaccacagtaatattgacagattacaaggacgacgatgacaagactgcgagttttgccgcagctcagaaagaatgtgtctgtgaaaactacaagctggccgtaaactgctttttgaatgacaatggtcaatgccagtgtacttcgattggtgcacaaaatactgtcctttgctcaaagctggctgccaaatgtttggtgatgaaggcagaaatgaacggctcaaaacttgggagaagagcgaaacctgaaggggctctccagaacaatgatggcctttacgatcctgactgcgatgagagcgggctctttaaggccaagcagtgcaacggcacctccacgtgctggtgtgtgaacactgctggggtcagaagaactgacaaggacactgaaataacctgctctgagcgagtgagaacctactggatcatcattgaattaaaacacaaagcaagagaaaaaccttatgatgttcaaagtttgcggactgcacttgaggaggcgatcaaaacgcgttatcaactggatccaaaatttatcacaaatattttgtatgaggataatgttatcactattgatctggttcaaaattcttctcagaaaactcagaatgatgtggacatagctgatgtggcttattattttgaaaaagatgttaaaggtgaatccttgtttcattctaagaaaatggacctgagagtaaatggggaacaactggatctggatcctggtcaaactttaatttattatgtcgatgaaaaagcacctgaattctcaatgcagggtctaaaagctggtgttattgctgttattgtggttgtggtgatagcaattgttgctggaattgttgtgctggttatttccagaaagaagagaatggcaaagtatgagaaggctgagataaaggagatgggtgagatgcatagggaactcaatgca

SEQ ID NO: 353 - protein, 333 aa, Artificial Sequence
  marmoset 1-27 CD3epsilon-EpCAM
QDGNEEMGDTTQNPYKVSISGTTVTLTDYKDDDDKTASFAAAQKECVCENYKLAVNCFLNDNGQCQCTSIGAQNTVLCSKLAAKCLVMKAEMNGSKLGRRAKPEGALQNNDGLYDPDCDESGLFKAKQCNGTSTCWCVNTAGVRRTDKDTEITCSERVRTYWIIIELKHKAREKPYDVQSLRTALEEAIKTRYQLDPKFITNILYEDNVITIDLVQNSSQKTQNDVDIADVAYYFEKDVKGESLFHSKKMDLRVNGEQLDLDPGQTLIYYVDEKAPEFSMQGLKAGVIAVIVVVVIAIVAGIVVLVISRKKRMAKYEKAEIKEMGEMHRELNA

SEQ ID NO: 354 - DNA, 1056 bp, Artificial Sequence
  marmoset 1-27 CD3epsilon-EpCAM
atgggatggagctgtatcatcctcttcttggtagcaacagctacaggtgtacactcccaggacggtaatgaagaaatgggtgatactacacagaacccatataaagtttccatctcaggaaccacagtaacactgacagattacaaggacgacgatgacaagactgcgagttttgccgcagctcagaaagaatgtgtctgtgaaaactacaagctggccgtaaactgctttttgaatgacaatggtcaatgccagtgtacttcgattggtgcacaaaatactgtcctttgctcaaagctggctgccaaatgtttggtgatgaaggcagaaatgaacggctcaaaacttgggagaagagcgaaacctgaaggggctctccagaacaatgatggcctttacgatcctgactgcgatgagagcgggctctttaaggccaagcagtgcaacggcacctccacgtgctggtgtgtgaacactgctggggtcagaagaactgacaaggacactgaaataacctgctctgagcgagtgagaacctactggatcatcattgaattaaaacacaaagcaagagaaaaaccttatgatgttcaaagtttgcggactgcacttgaggaggcgatcaaaacgcgttatcaactggatccaaaatttatcacaaatattttgtatgaggataatgttatcactattgatctggttcaaaattcttctcagaaaactcagaatgatgtggacatagctgatgtggcttattattttgaaaaagatgttaaaggtgaatccttgtttcattctaagaaaatggacctgagagtaaatggggaacaactggatctggatcctggtcaaactttaatttattatgtcgatgaaaaagcacctgaattctcaatgcagggtctaaaagctggtgttattgctgttattgtggttgtggtgatagcaattgttgctggaattgttgtgctggttatttccagaaagaagagaatggcaaagtatgagaaggctgagataaaggagatgggtgagatgcatagggaactcaatgca

SEQ ID NO: 355 - protein, 333 aa, Artificial Sequence; identical to SEQ ID NO: 353
  tamarin 1-27 CD3epsilon-EpCAM

SEQ ID NO: 356 - DNA, 1056 bp, Artificial Sequence; identical to SEQ ID NO: 354
  tamarin 1-27 CD3epsilon-EpCAM

SEQ ID NO: 357 - DNA, 1056 bp, Artificial Sequence
  squirrel monkey 1-27 CD3epsilon-EpCAM
atgggatggagctgtatcatcctcttcttggtagcaacagctacaggtgtacactcccaggacggtaatgaagagattggtgatactacccagaacccatataaagtttccatctcaggaaccacagtaacactgacagattacaaggacgacgatgacaagactgcgagttttgccgcagctcagaaagaatgtgtctgtgaaaactacaagctggccgtaaactgctttttgaatgacaatggtcaatgccagtgtacttcgattggtgcacaaaatactgtcctttgctcaaagctggctgccaaatgtttggtgatgaaggcagaaatgaacggctcaaaacttgggagaagagcgaaacctgaaggggctctccagaacaatgatggcctttacgatcctgactgcgatgagagcgggctctttaaggccaagcagtgcaacggcacctccacgtgctggtgtgtgaacactgctggggtcagaagaactgacaaggacactgaaataacctgctctgagcgagtgagaacctactggatcatcattgaattaaaacacaaagcaagagaaaaaccttatgatgttcaaagtttgcggactgcacttgaggaggcgatcaaaacgcgttatcaactggatccaaaatttatcacaaatattttgtatgaggataatgttatcactattgatctggttcaaaattcttctcagaaaactcagaatgatgtggacatagctgatgtggcttattattttgaaaaagatgttaaaggtgaatccttgtttcattctaagaaaatggacctgagagtaaatggggaacaactggatctggatcctggtcaaactttaatttattatgtcgatgaaaaagcacctgaattctcaatgcagggtctaaaagctggtgttattgctgttattgtggttgtggtgatagcaattgttgctggaattgttgtgctggttatttccagaaagaagagaatggcaaagtatgagaaggctgagataaaggagatgggtgagatgcatagggaactcaatgca

SEQ ID NO: 358 - protein, 333 aa, Artificial Sequence
  squirrel monkey 1-27 CD3epsilon-EpCAM
QDGNEEIGDTTQNPYKVSISGTTVTLTDYKDDDDKTASFAAAQKECVCENYKLAVNCFLNDNGQCQCTSIGAQNTVLCSKLAAKCLVMKAEMNGSKLGRRAKPEGALQNNDGLYDPDCDESGLFKAKQCNGTSTCWCVNTAGVRRTDKDTEITCSERVRTYWIIIELKHKAREKPYDVQSLRTALEEAIKTRYQLDPKFITNILYEDNVITIDLVQNSSQKTQNDVDIADVAYYFEKDVKGESLFHSKKMDLRVNGEQLDLDPGQTLIYYVDEKAPEFSMQGLKAGVIAVIVVVVIAIVAGIVVLVISRKKRMAKYEKAEIKEMGEMHRELNA

SEQ ID NO: 359 - protein, 333 aa, Artificial Sequence
  swine 1-27 CD3epsilon-EpCAM
QEDIERPDEDTQKTFKVSISGDKVELTDYKDDDDKTASFAAAQKECVCENYKLAVNCFLNDNGQCQCTSIGAQNTVLCSKLAAKCLVMKAEMNGSKLGRRAKPEGALQNNDGLYDPDCDESGLFKAKQCNGTSTCWCVNTAGVRRTDKDTEITCSERVRTYWIIIELKHKAREKPYDVQSLRTALEEAIKTRYQLDPKFITNILYEDNVITIDLVQNSSQKTQNDVDIADVAYYFEKDVKGESLFHSKKMDLRVNGEQLDLDPGQTLIYYVDEKAPEFSMQGLKAGVIAVIVVVVIAIVAGIVVLVISRKKRMAKYEKAEIKEMGEMHRELNA

SEQ ID NO: 360 - DNA, 1056 bp, Artificial Sequence
  swine 1-27 CD3epsilon-EpCAM
atgggatggagctgtatcatcctcttcttggtagcaacagctacaggtgtacactcccaagaagacattgaaagaccagatgaagatacacagaaaacatttaaagtctccatctctggagacaaagtagagctgacagattacaaggacgacgatgacaagactgcgagttttgccgcagctcagaaagaatgtgtctgtgaaaactacaagctggccgtaaactgctttttgaatgacaatggtcaatgccagtgtacttcgattggtgcacaaaatactgtcctttgctcaaagctggctgccaaatgtttggtgatgaaggcagaaatgaacggctcaaaacttgggagaagagcgaaacctgaaggggctctccagaacaatgatggcctttacgatcctgactgcgatgagagcgggctctttaaggccaagcagtgcaacggcacctccacgtgctggtgtgtgaacactgctggggtcagaagaactgacaaggacactgaaataacctgctctgagcgagtgagaacctactggatcatcattgaattaaaacacaaagcaagagaaaaaccttatgatgttcaaagtttgcggactgcacttgaggaggcgatcaaaacgcgttatcaactggatccaaaatttatcacaaatattttgtatgaggataatgttatcactattgatctggttcaaaattcttctcagaaaactcagaatgatgtggacatagctgatgtggcttattattttgaaaaagatgttaaaggtgaatccttgtttcattctaagaaaatggacctgagagtaaatggggaacaactggatctggatcctggtcaaactttaatttattatgtcgatgaaaaagcacctgaattctcaatgcagggtctaaaagctggtgttattgctgttattgtggttgtggtgatagcaattgttgctggaattgttgtgctggttatttccagaaagaagagaatggcaaagtatgagaaggctgagataaaggagatgggtgagatgcatagggaactcaatgca

SEQ ID NO: 361 - protein, 186 aa, Homo sapiens
QDGNEEMGGITQTPYKVSISGTTVILTCPQYPGSEILWQHNDKNIGGDEDDKNIGSDEDHLSLKEFSELEQSGYYVCYPRGSKPEDANFYLYLRARVCENCMEMDVMSVATIVIVDICITGGLLLLVYYWSKNRKAKAKPVTRGAGAGGRQRGQNKERPPPVPNPDYEPIRKGQRDLYSGLNQRRI

SEQ ID NO: 362 - DNA, 621 bp, Homo sapiens
atgcagtcgggcactcactggagagttctgggcctctgcctcttatcagttggcgtttgggggcaagatggtaatgaagaaatgggtggtattacacagacaccatataaagtctccatctctggaaccacagtaatattgacatgccctcagtatcctggatctgaaatactatggcaacacaatgataaaaacataggcggtgatgaggatgataaaaacataggcagtgatgaggatcacctgtcactgaaggaattttcagaattggagcaaagtggttattatgtctgctaccccagaggaagcaaaccagaagatgcgaacttttatctctacctgagggcacgcgtgtgtgagaactgcatggagatggatgtgatgtcggtggccacaattgtcatagtggacatctgcatcactgggggcttgctgctgctggtttactactggagcaagaatagaaaggccaaggccaagcctgtgacacgaggagcgggtgctggcggcaggcaaaggggacaaaacaaggagaggccaccacctgttcccaacccagactatgagcccatccggaaaggccagcgggacctgtattctggcctgaatcagagacgcatc

SEQ ID NO: 363 - protein, 19 aa, Artificial Sequence
  19 amino acid immunoglobulin leader peptide
MGWSCIILFLVATATGVHS

SEQ ID NO: 364 - DNA, 57 bp, Artificial Sequence
  19 amino acid immunoglobulin leader peptide
atgggatggagctgtatcatcctcttcttggtagcaacagctacaggtgtacactcc

SEQ ID NO: 365 - protein, 324 aa, Mus sp.
AKTTPPSVYPLAPGSAAQTNSMVTLGCLVKGYFPEPVTVTWNSGSLSSGVHTFPAVLQSDLYTLSSSVTVPSSTWPSETVTCNVAHPASSTKVDKKIVPRDCGCKPCICTVPEVSSVFIFPPKPKDVLTITLTPKVTCVVVDISKDDPEVQFSWFVDDVEVHTAQTQPREEQFNSTFRSVSELPIMHQDWLNGKEFKCRVNSAAFPAPIEKTISKTKGRPKAPQVYTIPPPKEQMAKDKVSLTCMITDFFPEDITVEWQWNGQPAENYKNTQPIMDTDGSYFVYSKLNVQKSNWEAGNTFTCSVLHEGLHNHHTEKSLSHSPGK

SEQ ID NO: 366 - DNA, 972 bp, Mus sp.
gccaaaacgacacccccatctgtctatccactggcccctggatctgctgcccaaactaactccatggtgaccctgggatgcctggtcaagggctatttccctgagccagtgacagtgacctggaactctggatccctgtccagcggtgtgcacaccttcccagctgtcctgcagtctgacctctacactctgagcagctcagtgactgtcccctccagcacctggcccagcgagaccgtcacctgcaacgttgcccacccggccagcagcaccaaggtggacaagaaaattgtgcccagggattgtggttgtaagccttgcatatgtacagtcccagaagtatcatctgtcttcatcttccccccaaagcccaaggatgtgctcaccattactctgactcctaaggtcacgtgtgttgtggtagacatcagcaaggatgatcccgaggtccagttcagctggtttgtagatgatgtggaggtgcacacagctcagacgcaaccccgggaggagcagttcaacagcactttccgctcagtcagtgaacttcccatcatgcaccaggactggctcaatggcaaggagttcaaatgcagggtcaacagtgcagctttccctgcccccatcgagaaaaccatctccaaaaccaaaggcagaccgaaggctccacaggtgtacaccattccacctcccaaggagcagatggccaaggataaagtcagtctgacctgcatgataacagacttcttccctgaagacattactgtggagtggcagtggaatgggcagccagcggagaactacaagaacactcagcccatcatggacacagatggctcttacttcgtctacagcaagctcaatgtgcagaagagcaactgggaggcaggaaatactttcacctgctctgtgttacatgagggcctgcacaaccaccatactgagaagagcctctcccactctcctggtaaa

SEQ ID NO: 367 - protein, 106 aa, Homo sapiens
GQPKAAPSVTLFPPSSEELQANKATLVCLISDFYPGAVTVAWKADSSPVKAGVETTTPSKQSNNKYAASSYLSLTPEQWKSHKSYSCQVTHEGSTVEKTVAPTECS

SEQ ID NO: 368 - DNA, 318 bp, Homo sapiens
ggtcagcccaaggctgccccctcggtcactctgttcccaccctcctctgaggagcttcaagccaacaaggccacactggtgtgtctcataagtgacttctacccgggagccgtgacagtggcctggaaggcagatagcagccccgtcaaggcgggagtggagaccaccacaccctccaaacaaagcaacaacaagtacgcggccagcagctacctgagcctgacgcctgagcagtggaagtcccacaaaagctacagctgccaggtcacgcatgaagggagcaccgtggagaagacagtggcccctacagaatgttca

SEQ ID NO: 369 - protein, 1186 aa, Homo sapiens
LEEKKVCQGTSNKLTQLGTFEDHFLSLQRMFNNCEVVLGNLEITYVQRNYDLSFLKTIQEVAGYVLIALNTVERIPLENLQIIRGNMYYENSYALAVLSNYDANKTGLKELPMRNLQEILHGAVRFSNNPALCNVESIQWRDIVSSDFLSNMSMDFQNHLGSCQKCDPSCPNGSCWGAGEENCQKLTKIICAQQCSGRCRGKSPSDCCHNQCAAGCTGPRESDCLVCRKFRDEATCKDTCPPLMLYNPTTYQMDVNPEGKYSFGATCVKKCPRNYVVTDHGSCVRACGADSYEMEEDGVRKCKKCEGPCRKVCNGIGIGEFKDSLSINATNIKHFKNCTSISGDLHILPVAFRGDSFTHTPPLDPQELDILKTVKEITGFLLIQAWPENRTDLHAFENLEIIRGRTKQHGQFSLAVVSLNITSLGLRSLKEISDGDVIISGNKNLCYANTINWKKLFGTSGQKTKIISNRGENSCKATGQVCHALCSPEGCWGPEPRDCVSCRNVSRGRECVDKCNLLEGEPREFVENSECIQCHPECLPQAMNITCTGRGPDNCIQCAHYIDGPHCVKTCPAGVMGENNTLVWKYADAGHVCHLCHPNCTYGCTGPGLEGCPTNGPKIPSIATGMVGALLLLLVVALGIGLFMRRRHIVRKRTLRRLLQERELVEPLTPSGEAPNQALLRILKETEFKKIKVLGSGAFGTVYKGLWIPEGEKVKIPVAIKELREATSPKANKEILDEAYVMASVDNPHVCRLLGICLTSTVQLITQLMPFGCLLDYVREHKDNIGSQYLLNWCVQIAKGMNYLEDRRLVHRDLAARNVLVKTPQHVKITDFGLAKLLGAEEKEYHAEGGKVPIKWMALESILHRIYTHQSDVWSYGVTVWELMTFGSKPYDGIPASEISSILEKGERLPQPPICTIDVYMIMVKCWMIDADSRPKFRELIIEFSKMARDPQRYLVIQGDERMHLPSPTDSNFYRALMDEEDMDDVVDADEYLIPQQGFFSSPSTSRTPLLSSLSATSNNSTVACIDRNGLQSCPIKEDSFLQRYSSDPTGALTEDSIDDTFLPVPEYINQSVPKRPAGSVQNPVYHNQPLNPAPSRDPHYQDPHSTAVGNPEYLNTVQPTCVNSTFDSPAHWAQKGSHQISLDNPDYQQDFFPKEAKPNGIFKGSTAENAEYLRVAPQSSEFIGA

SEQ ID NO: 370 - DNA, 3630 bp, Homo sapiens
atgcgaccctccgggacggccggggcagcgctcctggcgctgctggctgcgctctgcccggcgagtcgggctctggaggaaaagaaagtttgccaaggcacgagtaacaagctcacgcagttgggcacttttgaagatcattttctcagcctccagaggatgttcaataactgtgaggtggtccttgggaatttggaaattacctatgtgcagaggaattatgatctttccttcttaaagaccatccaggaggtggctggttatgtcctcattgccctcaacacagtggagcgaattcctttggaaaacctgcagatcatcagaggaaatatgtactacgaaaattcctatgccttagcagtcttatctaactatgatgcaaataaaaccggactgaaggagctgcccatgagaaatttacaggaaatcctgcatggcgccgtgcggttcagcaacaaccctgccctgtgcaacgtggagagcatccagtggcgggacatagtcagcagtgactttctcagcaacatgtcgatggacttccagaaccacctgggcagctgccaaaagtgtgatccaagctgtcccaatgggagctgctggggtgcaggagaggagaactgccagaaactgaccaaaatcatctgtgcccagcagtgctccgggcgctgccgtggcaagtcccccagtgactgctgccacaaccagtgtgctgcaggctgcacaggcccccgggagagcgactgcctggtctgccgcaaattccgagacgaagccacgtgcaaggacacctgccccccactcatgctctacaaccccaccacgtaccagatggatgtgaaccccgagggcaaatacagctttggtgccacctgcgtgaagaagtgtccccgtaattatgtggtgacagatcacggctcgtgcgtccgagcctgtggggccgacagctatgagatggaggaagacggcgtccgcaagtgtaagaagtgcgaagggccttgccgcaaagtgtgtaacggaataggtattggtgaatttaaagactcactctccataaatgctacgaatattaaacacttcaaaaactgcacctccatcagtggcgatctccacatcctgccggtggcatttaggggtgactccttcacacatactcctcctctggatccacaggaactggatattctgaaaaccgtaaaggaaatcacagggtttttgctgattcaggcttggcctgaaaacaggacggacctccatgcctttgagaacctagaaatcatacgcggcaggaccaagcaacatggtcagttttctcttgcagtcgtcagcctgaacataacatccttgggattacgctccctcaaggagataagtgatggagatgtgataatttcaggaaacaaaaatttgtgctatgcaaatacaataaactggaaaaaactgtttgggacctccggtcagaaaaccaaaattataagcaacagaggtgaaaacagctgcaaggccacaggccaggtctgccatgccttgtgctcccccgagggctgctggggcccggagcccagggactgcgtctcttgccggaatgtcagccgaggcagggaatgcgtggacaagtgcaaccttctggagggtgagccaagggagtttgtggagaactctgagtgcatacagtgccacccagagtgcctgcctcaggccatgaacatcacctgcacaggacggggaccagacaactgtatccagtgtgcccactacattgacggcccccactgcgtcaagacctgcccggcaggagtcatgggagaaaacaacaccctggtctggaagtacgcagacgccggccatgtgtgccacctgtgccatccaaactgcacctacggatgcactgggccaggtcttgaaggctgtccaacgaatgggcctaagatcccgtccatcgccactgggatggtgggggccctcctcttgctgctggtggtggccctggggatcggcctcttcatgcgaaggcgccacatcgttcggaagcgcacgctgcggaggctgctgcaggagagggagcttgtggagcctcttacacccagtggagaagctcccaaccaagctctcttgaggatcttgaaggaaactgaattcaaaaagatcaaagtgctgggctccggtgcgttcggcacggtgtataagggactctggatcccagaaggtgagaaagttaaaattcccgtcgctatcaaggaattaagagaagcaacatctccgaaagccaacaaggaaatcctcgatgaagcctacgtgatggccagcgtggacaacccccacgtgtgccgcctgctgggcatctgcctcacctccaccgtgcagctcatcacgcagctcatgcccttcggctgcctcctggactatgtccgggaacacaaagacaatattggctcccagtacctgctcaactggtgtgtgcagatcgcaaagggcatgaactacttggaggaccgtcgcttggtgcaccgcgacctggcagccaggaacgtactggtgaaaacaccgcagcatgtcaagatcacagattttgggctggccaaactgctgggtgcggaagagaaagaataccatgcagaaggaggcaaagtgcctatcaagtggatggcattggaatcaattttacacagaatctatacccaccagagtgatgtctggagctacggggtgaccgtttgggagttgatgacctttggatccaagccatatgacggaatccctgccagcgagatctcctccatcctggagaaaggagaacgcctccctcagccacccatatgtaccatcgatgtctacatgatcatggtcaagtgctggatgatagacgcagatagtcgcccaaagttccgtgagttgatcatcgaattctccaaaatggcccgagacccccagcgctaccttgtcattcagggggatgaaagaatgcatttgccaagtcctacagactccaacttctaccgtgccctgatggatgaagaagacatggacgacgtggtggatgccgacgagtacctcatcccacagcagggcttcttcagcagcccctccacgtcacggactcccctcctgagctctctgagtgcaaccagcaacaattccaccgtggcttgcattgatagaaatgggctgcaaagctgtcccatcaaggaagacagcttcttgcagcgatacagctcagaccccacaggcgccttgactgaggacagcatagacgacaccttcctcccagtgcctgaatacataaaccagtccgttcccaaaaggcccgctggctctgtgcagaatcctgtctatcacaatcagcctctgaaccccgcgcccagcagagacccacactaccaggacccccacagcactgcagtgggcaaccccgagtatctcaacactgtccagcccacctgtgtcaacagcacattcgacagccctgcccactgggcccagaaaggcagccaccaaattagcctggacaaccctgactaccagcaggacttctttcccaaggaagccaagccaaatggcatctttaagggctccacagctgaaaatgcagaatacctaagggtcgcgccacaaagcagtgaatttattggagca

SEQ ID NO: 371 - protein, 1186 aa, Artificial Sequence
  cynomolgus EGF-R extracellular domain with human EGF-R transmembrane and intracellular domain
LEEKKVCQGTSNKLTQLGTFEDHFLSLQRMFNNCEVVLGNLEITYVQRNYDLSFLKTIQEVAGYVLIALNTVERIPLENLQIIRGNMYYENSYALAVLSNYDANKTGLKELPMRNLQEILHGAVRFSNNPALCNVESIQWRDIVSSEFLSNMSMDFQNHLGSCQKCDPSCPNGSCWGAGEENCQKLTKIICAQQCSGRCRGKSPSDCCHNQCAAGCTGPRESDCLVCRKFRDEATCKDTCPPLMLYNPTTYQMDVNPEGKYSFGATCVKKCPRNYVVTDHGSCVRACGADSYEMEEDGVRKCKKCEGPCRKVCNGIGIGEFKDTLSINATNIKHFKNCTSISGDLHILPVAFRGDSFTHTPPLDPQELDILKTVKEITGFLLIQAWPENRTDLHAFENLEIIRGRTKQHGQFSLAVVSLNITSLGLRSLKEISDGDVIISGNKNLCYANTINWKKLFGTSSQKTKIISNRGENSCKATGQVCHALCSPEGCWGPEPRDCVSCQNVSRGRECVDKCNILEGEPREFVENSECIQCHPECLPQVMNITCTGRGPDNCIQCAHYIDGPHCVKTCPAGVMGENNTLVWKYADAGHVCHLCHPNCTYGCTGPGLEGCARNGPKIPSIATGMLGALLLLLVVALGIGLFMRRRHIVRKRTLRRLLQERELVEPLTPSGEAPNQALLRILKETEFKKIKVLGSGAFGTVYKGLWIPEGEKVKIPVAIKELREATSPKANKEILDEAYVMASVDNPHVCRLLGICLTSTVQLITQLMPFGCLLDYVREHKDNIGSQYLLNWCVQIAKGMNYLEDRRLVHRDLAARNVLVKTPQHVKITDFGLAKLLGAEEKEYHAEGGKVPIKWMALESILHRIYTHQSDVWSYGVTVWELMTFGSKPYDGIPASEISSILEKGERLPQPPICTIDVYMIMVKCWMIDADSRPKFRELIIEFSKMARDPQRYLVIQGDERMHLPSPTDSNFYRALMDEEDMDDVVDADEYLIPQQGFFSSPSTSRTPLLSSLSATSNNSTVACIDRNGLQSCPIKEDSFLQRYSSDPTGALTEDSIDDTFLPVPEYINQSVPKRPAGSVQNPVYHNQPLNPAPSRDPHYQDPHSTAVGNPEYLNTVQPTCVNSTFDSPAHWAQKGSHQISLDNPDYQQDFFPKEAKPNGIFKGSTAENAEYLRVAPQSSEFIGA

SEQ ID NO: 372 - DNA, 3630 bp, Artificial Sequence
  cynomolgus EGF-R extracellular domain with human EGF-R transmembrane and intracellular domain
  misc_feature (1185)..(1185): n is a, c, g, or t
  misc_feature (1554)..(1554): n is a, c, g, or t
atgcgaccctccgggacggccggggcagcgctcctggcgctgctggctgcgctctgcccggcgagtcgggctctggaggaaaagaaagtttgccaaggcacgagtaacaaactcacgcagttgggcacttttgaagatcattttctcagcctccagaggatgttcaataactgtgaggtggtccttgggaatttggaaattacctacgtgcagaggaattatgatctttccttcttaaagaccatccaggaggtggctggttatgtcctcatcgccctcaacacagtggagcggattcctttggaaaacctgcagatcatcagaggaaacatgtactatgaaaattcctatgccttagcagtcttatctaactatgatgcaaataaaaccggactgaaggagctgcccatgagaaacttacaggaaatcctgcatggcgccgtgcggttcagcaacaaccctgccctgtgcaacgtggagagcatccagtggcgggacatagtcagcagcgagtttctcagcaacatgtcgatggacttccagaaccacctgggcagctgccaaaagtgtgatccaagctgtcccaatgggagctgctggggtgcaggagaggagaactgccagaaactgaccaaaatcatctgtgcccagcagtgctccgggcgctgccgcggcaagtcccccagtgactgctgccacaaccagtgtgccgcgggctgcacgggcccccgggagagcgactgcctggtctgccgcaaattccgagacgaagccacgtgcaaggacacctgccccccactcatgctctacaaccccaccacataccagatggatgtgaaccccgagggcaaatacagctttggtgccacctgcgtgaagaagtgtccccgtaattatgtggtgacagatcacggctcgtgcgtccgagcctgcggggccgacagctatgagatggaggaagacggcgtccgcaagtgtaagaagtgcgaagggccttgccgcaaagtgtgtaatggaataggtattggtgaatttaaagacacactctccataaatgctacaaatattaaacacttcaaaaactgcacctccatcagtggcgatctccacatcctgccggtggcatttaggggtgactccttcacacacactccgcctctggatccacaggaactggatattctnaaaaccgtaaaggaaatcacagggtttttgctgattcaggcttggcctgaaaacaggacggacctccatgcttttgagaacctagaaatcatacgtggcaggaccaagcaacacggtcagttttctcttgcggtcgtcagcctgaacataacatccttgggattacgctccctcaaggagataagcgatggagatgtgataatttcaggaaacaaaaatttgtgctatgcaaatacaataaactggaaaaaactgtttgggacctccagtcagaaaaccaaaattataagcaacagaggtgaaaacagctgcaaggccacgggccaggtctgccatgccttgtgctcccccgagggctgctggggcccngagcccagggactgcgtctcctgccagaatgtcagccgaggcagagaatgcgtggacaagtgcaacatcctggagggcgagccaagggagtttgtggagaactctgagtgcatacagtgccacccagaatgcctgccccaggtcatgaacatcacctgcacaggacggggaccagacaactgtatccagtgtgcccactacattgacggcccccactgcgtcaagacctgcccagcaggagtcatgggagaaaacaacaccctggtctggaagtacgcagacgccggccacgtgtgccacctgtgccatccaaactgcacctacggatgcactgggccaggtcttgaaggctgtgcaaggaacgggcctaagatcccatccatcgccactggcatgctgggggccctcctcttgctgctggtggtggccctggggatcggcctcttcatgcgaaggcgccacatcgttcggaagcgcacgctgcggaggctgctgcaggagagggagcttgtggagcctcttacacccagtggagaagctcccaaccaagctctcttgaggatcttgaaggaaactgaattcaaaaagatcaaagtgctgggctccggtgcgttcggcacggtgtataagggactctggatcccagaaggtgagaaagttaaaattcccgtcgctatcaaggaattaagagaagcaacatctccgaaagccaacaaggaaatcctcgatgaagcctacgtgatggccagcgtggacaacccccacgtgtgccgcctgctgggcatctgcctcacctccaccgtgcagctcatcacgcagctcatgcccttcggctgcctcctggactatgtccgggaacacaaagacaatattggctcccagtacctgctcaactggtgtgtgcagatcgcaaagggcatgaactacttggaggaccgtcgcttggtgcaccgcgacctggcagccaggaacgtactggtgaaaacaccgcagcatgtcaagatcacagattttgggctggccaaactgctgggtgcggaagagaaagaataccatgcagaaggaggcaaagtgcctatcaagtggatggcattggaatcaattttacacagaatctatacccaccagagtgatgtctggagctacggggtgaccgtttgggagttgatgacctttggatccaagccatatgacggaatccctgccagcgagatctcctccatcctggagaaaggagaacgcctccctcagccacccatatgtaccatcgatgtctacatgatcatggtcaagtgctggatgatagacgcagatagtcgcccaaagttccgtgagttgatcatcgaattctccaaaatggcccgagacccccagcgctaccttgtcattcagggggatgaaagaatgcatttgccaagtcctacagactccaacttctaccgtgccctgatggatgaagaagacatggacgacgtggtggatgccgacgagtacctcatcccacagcagggcttcttcagcagcccctccacgtcacggactcccctcctgagctctctgagtgcaaccagcaacaattccaccgtggcttgcattgatagaaatgggctgcaaagctgtcccatcaaggaagacagcttcttgcagcgatacagctcagaccccacaggcgccttgactgaggacagcatagacgacaccttcctcccagtgcctgaatacataaaccagtccgttcccaaaaggcccgctggctctgtgcagaatcctgtctatcacaatcagcctctgaaccccgcgcccagcagagacccacactaccaggacccccacagcactgcagtgggcaaccccgagtatctcaacactgtccagcccacctgtgtcaacagcacattcgacagccctgcccactgggcccagaaaggcagccaccaaattagcctggacaaccctgactaccagcaggacttctttcccaaggaagccaagccaaatggcatctttaagggctccacagctgaaaatgcagaatacctaagggtcgcgccacaaagcagtgaatttattggagca

SEQ ID NO: 373 - protein, 800 aa, Homo sapiens
DYKDDDDKSRTRSGSQLDGGLVLFSHRGTLDGGFRFRLSDGEHTSPGHFFRVTAQKQVLLSLKGSQTLTVCPGSVQPLSSQTLRASSSAGTDPQLLLYRVVRGPQLGRLFHAQQDSTGEALVNFTQAEVYAGNILYEHEMPPEPFWEAHDTLELQLSSPPARDVAATLAVAVSFEAACPQRPSHLWKNKGLWVPEGQRARITVAALDASNLLASVPSPQRSEHDVLFQVTQFPSRGQLLVSEEPLHAGQPHFLQSQLAAGQLVYAHGGGGTQQDGFHFRAHLQGPAGASVAGPQTSEAFAITVRDVNERPPQPQASVPLRLTRGSRAPISRAQLSVVDPDSAPGEIEYEVQRAPHNGFLSLVGGGLGPVTRFTQADVDSGRLAFVANGSSVAGIFQLSMSDGASPPLPMSLAVDILPSAIEVQLRAPLEVPQALGRSSLSQQQLRVVSDREEPEAAYRLIQGPQYGHLLVGGRPTSAFSQFQIDQGEVVFAFTNSSSSHDHFRVLALARGVNASAVVNVTVRALLHVWAGGPWPQGATLRLDPTVLDAGELANRTDSVPRFRLLEGPRHGRVVRVPRARTEPGGSQLVEQFTQQDLEDGRLGLEVGRPEGRAPGPAGDSLTLELWAQGVPPAVASLDFATEPYNAARPYSVALLSVPEAARTEAGKPESSTPTGEPGPMASSPEPAVAKGGFLSFLEANMFSVIIPMCLVLLLLALILPLLFYLRKRNKTGKHDVQVLTAKPRNGLAGDTETFRKVEPGQAIPLTAVPGQGPPPGGQPDPELLQFCRTPNPALKNGQYWV

SEQ ID NO: 374 - DNA, 2457 bp, Homo sapiens
atgggatggagctgtatcatcctcttcttggtagcaacagctacaggtgtacactccgactacaaagacgatgacgacaagtcccgtacgagatctggatcccaattggacggcgggctcgtgctgttctcacacagaggaaccctggatggaggcttccgcttccgcctctctgacggcgagcacacttcccccggacacttcttccgagtgacggcccagaagcaagtgctcctctcgctgaagggcagccagacactgactgtctgcccagggtccgtccagccactcagcagtcagaccctcagggccagctccagcgcaggcactgacccccagctcctgctctaccgtgtggtgcggggcccccagctaggccggctgttccacgcccagcaggacagcacaggggaggccctggtgaacttcactcaggcagaggtctacgctgggaatattctgtatgagcatgagatgccccccgagcccttttgggaggcccatgataccctagagctccagctgtcctcgccgcctgcccgggacgtggccgccacccttgctgtggctgtgtcttttgaggctgcctgtccccagcgccccagccacctctggaagaacaaaggtctctgggtccccgagggccagcgggccaggatcaccgtggctgctctggatgcctccaatctcttggccagcgttccatcaccccagcgctcagagcatgatgtgctcttccaggtcacacagttccccagccgcggccagctgttggtgtccgaggagcccctccatgctgggcagccccacttcctgcagtcccagctggctgcagggcagctagtgtatgcccacggcggtgggggcacccagcaggatggcttccactttcgtgcccacctccaggggccagcaggggcctccgtggctggaccccaaacctcagaggcctttgccatcacggtgagggatgtaaatgagcggccccctcagccacaggcctctgtcccactccggctcacccgaggctctcgtgcccccatctcccgggcccagctgagtgtggtggacccagactcagctcctggggagattgagtacgaggtccagcgggcaccccacaacggcttcctcagcctggtgggtggtggcctggggcccgtgacccgcttcacgcaagccgatgtggattcagggcggctggccttcgtggccaacgggagcagcgtggcaggcatcttccagctgagcatgtctgatggggccagcccacccctgcccatgtccctggctgtggacatcctaccatccgccatcgaggtgcagctgcgggcacccctggaggtgccccaagctttggggcgctcctcactgagccagcagcagctccgggtggtttcagatcgggaggagccagaggcagcataccggttgatccagggaccccagtatgggcatctcctggtgggcgggcggcccacctcggccttcagccaattccagatagaccagggcgaggtggtctttgccttcaccaactcctcctcctctcatgaccacttcagagtcctggcactggctaggggtgtcaatgcatcagccgtagtgaacgtcactgtgagggctctgctgcatgtgtgggcaggtgggccatggccccagggtgccaccctgcgcctggaccccaccgtcctagatgctggcgagctggccaaccgcacagacagtgtgccgcgcttccgcctcctggagggaccccggcatggccgcgtggtccgcgtgccccgagccaggacggagcccgggggcagccagctggtggagcagttcactcagcaggaccttgaggacgggaggctggggctggaggtgggcaggccagaggggagggcccccggccccgcaggtgacagtctcactctggagctgtgggcacagggcgtcccgcctgctgtggcctccctggactttgccactgagccttacaatgctgcccggccctacagcgtggccctgctcagtgtccccgaggccgcccggacggaagcagggaagccagagagcagcacccccacaggcgagccaggccccatggcatccagccctgagcccgctgtggccaagggaggcttcctgagctttctagaggccaacatgttcagcgtcatcatccccatgtgcctggtacttctgctcctggcgctcatcctgcccctgctcttctacctccgaaaacgcaacaagacgggcaagcatgacgtccaggtcctgactgccaagccccgcaacggcctggctggtgacaccgagacctttcgcaaggtggagccaggccaggccatcccgctcacagctgtgcctggccaggggccccctccaggaggccagcctgacccagagctgctgcagttctgccggacacccaaccctgcccttaagaatggccagtactgggtg

SEQ ID NO: 375 - protein, 807 aa, Macaca fascicularis
  misc_feature (714)..(714): Xaa can be any naturally occurring amino acid
PSNGRVVLRAAPGTEVRSFTQAQLDGGLVLFSHRGTLDGGFRFGLSDGEHTSSGHFFRVTAQKQVLLSLEGSRTLTVCPGSVQPLSSQTLRASSSAGTDPQLLLYRVVRGPQLGRLFHAQQDSTGEALVNFTQAEVYAGNILYEHEMPTEPFWEAHDTLELQLSSPPARDVAATLAVAVSFEAACPQRPSHLWKNKGLWVPEGQRAKITMAALDASNLLASVPSSQRLEHDVLFQVTQFPSRGQLLVSEEPLHAGQPHFLQSQLAAGQLVYAHGGGGTQQDGFHFRAHLQGPAGATVAGPQTSEAFAITVRDVNERPPQPQASVPLRITRGSRAPISRAQLSVVDPDSAPGEIEYEVQRAPHNGFLSLVGGGPGPVNRFTQADVDSGRLAFVANGSSVAGVFQLSMSDGASPPLPMSLAVDILPSAIEVQLQAPLEVPQALGRSSLSQQQLRVVSDREEPEAAYRLIQGPKYGHLLVGGQPASAFSQLQIDQGEVVFAFTNFSSSHDHFRVLALARGVNASAVVNITVRALLHVWAGGPWPQGATLRLDPTILDAGELANRTGSVPRFRLLEGPRHGRVVRVPRARMEPGGSQLVEQFTQQDLEDGRLGLEVGRPEGRAPSPTGDSLTLELWAQGVPPAVASLDFATEPYNAARPYSVALLSVPEATRTEAGKPESSTPTGEPGPMASSPVPAVAKGGFLGFLEANMFSVIIPXCLVLLLLALILPLLFYLRKRNKTGKHDVQVLTAKPRNGLAGDTETFRKVEPGQAIPLTAVPGQGPPPGGQPDPELLQFCRTPNPALKNGQYWV

SEQ ID NO: 376 - DNA, 2421 bp, Macaca fascicularis
cccagcaacggacgggtagtgctgcgggcggcgccgggcaccgaggtgcgcagcttcacgcaggcccagctggatggcggactcgtgctgttctcacacagaggaaccctggatggaggcttccgcttcggcctctccgatggcgagcacacttcctctggacacttcttccgagtgacggcccagaagcaagtgctcctctcgctggagggcagccggacactgactgtctgcccagggtccgtgcagccactcagcagtcagaccctcagagccagctccagcgcaggcaccgacccccagctcctgctctaccgtgtggtgcggggcccccagctaggccggctgttccatgcccagcaggacagcacaggggaggccctggtgaacttcactcaggcagaggtctatgctgggaatattctgtatgagcatgagatgcccaccgagcccttctgggaggcccatgataccctagagctccagctgtcctcaccacctgcccgggacgtggctgccacccttgctgtggctgtgtcttttgaggctgcctgtccccagcgccccagccacctctggaagaacaaaggtctctgggtccccgagggccagcgggccaagatcaccatggctgccctggatgcctccaacctcttggccagcgttccatcatcccagcgcctagagcatgatgtgctcttccaggtcacgcagttccccagccggggccagctattggtgtctgaggagcccctccacgctgggcagccccacttcctgcagtcccagctggctgcagggcagctagtgtatgcccacggcggtgggggtacccaacaggatggcttccactttcgtgcccacctccaggggccagcaggggccaccgtggctggaccccaaacctcagaggcttttgccatcacggtgcgggatgtaaatgagcggccccctcagccacaggcctctgtcccactccggatcacccgaggctctcgagcccccatctcccgggcccagctgagtgtcgtggacccagactcagctcctggggagattgagtatgaggtccagcgggcaccccacaacggcttcctcagcctggtgggtggtggcccggggcccgtgaaccgcttcacgcaagccgatgtggattcggggcggctggccttcgtggccaacgggagcagcgtagcaggcgtcttccagctgagcatgtctgatggggccagcccaccgctgcccatgtccctggccgtggacatcctaccatccgccatcgaggtgcagctgcaggcacccctggaggtgccccaagctttggggcgctcctcactgagccagcagcagctccgggtggtttcagatagggaggagccagaggcagcataccgcctcatccagggaccaaagtacgggcatctcctggtgggtgggcagcccgcctcggccttcagccaactccagatagaccagggcgaggtggtctttgccttcaccaacttctcctcctctcatgaccacttcagagtcctggcactggctaggggtgtcaacgcatcagccgtagtgaacatcactgtgagggctctgctgcacgtgtgggcaggtgggccatggccccagggtgctaccctgcgcctggacccaaccatcctagatgctggcgagctggccaaccgcacaggcagtgtgccccgcttccgcctcctggagggaccccggcatggccgcgtggtccgtgtgccccgagccaggatggagcctgggggcagccagctggtggagcagttcactcagcaggaccttgaggatgggaggctggggctggaggtgggcaggccagagggaagggcccccagccccacaggcgacagtctcactctggagctgtgggcacagggcgtcccacctgctgtggcctccctggactttgccactgagccttacaatgctgcccggccctacagcgtggccctgctcagtgtccccgaggccacccggacggaagcagggaagccagagagcagcacccccacaggcgagccaggccccatggcatctagccctgtgcctgctgtggccaagggaggcttcctgggcttccttgaggccaacatgttcagtgtcatcatccccrtgtgcctggtccttctgctcctggcgctcatcttgcccctgctcttctacctccgaaaacgcaacaagacgggcaagcatgacgtccaggtcctgactgccaagccccgcaatggtctggctggtgacactgagacctttcgcaaggtggagccaggccaggccatcccgctcacagctgtgcctggccaggggccccctccgggaggccagcctgacccagagctgctgcagttctgccggacacccaaccctgcccttaagaatggccagtactgggtg

SEQ ID NO: 377 - DNA, 18 bp, Artificial Sequence
  PCR primer for CD3epsilon chain - forward primer
agagttctgggcctctgc

SEQ ID NO: 378 - DNA, 19 bp, Artificial Sequence
  PCR primer for CD3epsilon chain - reverse primer
cggatgggctcatagtctg

SEQ ID NO: 379 - protein, 192 aa, Artificial Sequence
  His6-human CD3epsilon
HHHHHHQDGNEEMGGITQTPYKVSISGTTVILTCPQYPGSEILWQHNDKNIGGDEDDKNIGSDEDHLSLKEFSELEQSGYYVCYPRGSKPEDANFYLYLRARVCENCMEMDVMSVATIVIVDICITGGLLLLVYYWSKNRKAKAKPVTRGAGAGGRQRGQNKERPPPVPNPDYEPIRKGQRDLYSGLNQRRI

SEQ ID NO: 380 - DNA, 633 bp, Artificial Sequence
  His6-human CD3epsilon
atgggatggagctgtatcatcctcttcttggtagcaacagctacaggtgtacactcccatcatcaccatcatcatcaagatggtaatgaagaaatgggtggtattacacagacaccatataaagtctccatctctggaaccacagtaatattgacatgccctcagtatcctggatctgaaatactatggcaacacaatgataaaaacataggcggtgatgaggatgataaaaacataggcagtgatgaggatcacctgtcactgaaggaattttcagaattggagcaaagtggttattatgtctgctaccccagaggaagcaaaccagaagatgcgaacttttatctctacctgagggcacgcgtgtgtgagaactgcatggagatggatgtgatgtcggtggccacaattgtcatagtggacatctgcatcactgggggcttgctgctgctggtttactactggagcaagaatagaaaggccaaggccaagcctgtgacacgaggagcgggtgctggcggcaggcaaaggggacaaaacaaggagaggccaccacctgttcccaacccagactatgagcccatccggaaaggccagcgggacctgtattctggcctgaatcagagacgcatc

SEQ ID NO: 381 - protein, 119 aa, Artificial Sequence [sequence omitted]

SEQ ID NO: 382 - DNA, 357 bp, Artificial Sequence
  VH of EGFR
caggtgcagctgcaggagtcgggcccaggactggtgaagccttcggagaccctgtccctcacctgcactgtctctggtggctccgtcagcagtggtgattactactggacctggatccggcagtccccagggaagggactggagtggattggacacatctattacagtgggaacaccaattataacccctccctcaagagccgactcaccatatcaattgacacgtccaagactcagttctccctgaagctgagttctgtgaccgctgcggacacggccatttattactgtgtgcgagatcgagtgactggtgcttttgatatctggggccaagggacaatggtcaccgtctcttcc

SEQ ID NO: 383 - protein, 107 aa, Artificial Sequence [sequence omitted]

SEQ ID NO: 384 - DNA, 321 bp, Artificial Sequence
  VL of EGFR
gacatccagatgacccagtctccatcctccctgtctgcatctgtcggagacagagtcaccatcacttgccaggcgagtcaggacatcagcaactatttaaattggtatcagcagaaaccagggaaagcccctaaactcctgatctacgatgcatccaatttggaaacaggggtcccatcaaggttcagtggaagtggatctgggacagattttactttcaccatcagcagcctgcagcctgaagatattgcaacatatttctgtcaacactttgatcatctcccgctcgctttcggcggagggaccaaggtggagatcaaa

SEQ ID NO: 385 - protein, 241 aa, Artificial Sequence
  VH-VL of EGFR
QVQLQESGPGLVKPSETLSLTCTVSGGSVSSGDYYWTWIRQSPGKGLEWIGHIYYSGNTNYNPSLKSRLTISIDTSKTQFSLKLSSVTAADTAIYYCVRDRVTGAFDIWGQGTMVTVSSGGGGSGGGGSGGGGSDIQMTQSPSSLSASVGDRVTITCQASQDISNYLNWYQQKPGKAPKLLIYDASNLETGVPSRFSGSGSGTDFTFTISSLQPEDIATYFCQHFDHLPLAFGGGTKVEIK

SEQ ID NO: 386 - DNA, 723 bp, Artificial Sequence
  VH-VL of EGFR
caggtgcagctgcaggagtcgggcccaggactggtgaagccttcggagaccctgtccctcacctgcactgtctctggtggctccgtcagcagtggtgattactactggacctggatccggcagtccccagggaagggactggagtggattggacacatctattacagtgggaacaccaattataacccctccctcaagagccgactcaccatatcaattgacacgtccaagactcagttctccctgaagctgagttctgtgaccgctgcggacacggccatttattactgtgtgcgagatcgagtgactggtgcttttgatatctggggccaagggacaatggtcaccgtctcttccggtggtggtggttctggcggcggcggctccggtggtggtggttctgacatccagatgacccagtctccatcctccctgtctgcatctgtcggagacagagtcaccatcacttgccaggcgagtcaggacatcagcaactatttaaattggtatcagcagaaaccagggaaagcccctaaactcctgatctacgatgcatccaatttggaaacaggggtcccatcaaggttcagtggaagtggatctgggacagattttactttcaccatcagcagcctgcagcctgaagatattgcaacatatttctgtcaacactttgatcatctcccgctcgctttcggcggagggaccaaggtggagatcaaa

SEQ ID NO: 387 - protein, 241 aa, Artificial Sequence
  VL-VH of EGFR
DIQMTQSPSSLSASVGDRVTITCQASQDISNYLNWYQQKPGKAPKLLIYDASNLETGVPSRFSGSGSGTDFTFTISSLQPEDIATYFCQHFDHLPLAFGGGTKVEIKGGGGSGGGGSGGGGSQVQLQESGPGLVKPSETLSLTCTVSGGSVSSGDYYWTWIRQSPGKGLEWIGHIYYSGNTNYNPSLKSRLTISIDTSKTQFSLKLSSVTAADTAIYYCVRDRVTGAFDIWGQGTMVTVSS

SEQ ID NO: 388 - DNA, 723 bp, Artificial Sequence
  VL-VH of EGFR
gacatccagatgacccagtctccatcctccctgtctgcatctgtcggagacagagtcaccatcacttgccaggcgagtcaggacatcagcaactatttaaattggtatcagcagaaaccagggaaagcccctaaactcctgatctacgatgcatccaatttggaaacaggggtcccatcaaggttcagtggaagtggatctgggacagattttactttcaccatcagcagcctgcagcctgaagatattgcaacatatttctgtcaacactttgatcatctcccgctcgctttcggcggagggaccaaggtggagatcaaaggtggtggtggttctggcggcggcggctccggtggtggtggttctcaggtgcagctgcaggagtcgggcccaggactggtgaagccttcggagaccctgtccctcacctgcactgtctctggtggctccgtcagcagtggtgattactactggacctggatccggcagtccccagggaagggactggagtggattggacacatctattacagtgggaacaccaattataacccctccctcaagagccgactcaccatatcaattgacacgtccaagactcagttctccctgaagctgagttctgtgaccgctgcggacacggccatttattactgtgtgcgagatcgagtgactggtgcttttgatatctggggccaagggacaatggtcaccgtctcttcc

SEQ ID NO: 389 - protein, 495 aa, Artificial Sequence
  EGFR VH-VL x I2C VH VL
QVQLQESGPGLVKPSETLSLTCTVSGGSVSSGDYYWTWIRQSPGKGLEWIGHIYYSGNTNYNPSLKSRLTISIDTSKTQFSLKLSSVTAADTAIYYCVRDRVTGAFDIWGQGTMVTVSSGGGGSGGGGSGGGGSDIQMTQSPSSLSASVGDRVTITCQASQDISNYLNWYQQKPGKAPKLLIYDASNLETGVPSRFSGSGSGTDFTFTISSLQPEDIATYFCQHFDHLPLAFGGGTKVEIKGGGGSEVQLVESGGGLVQPGGSLKLSCAASGFTFNKYAMNWVRQAPGKGLEWVARIRSKYNNYATYYADSVKDRFTISRDDSKNTAYLQMNNLKTEDTAVYYCVRHGNFGNSYISYWAYWGQGTLVTVSSGGGGSGGGGSGGGGSQTVVTQEPSLTVSPGGTVTLTCGSSTGAVTSGNYPNWVQQKPGQAPRGLIGGTKFLAPGTPARFSGSLLGGKAALTLSGVQPEDEAEYYCVLWYSNRWVFGGGTKLTVL

SEQ ID NO: 390 - DNA, 1485 bp, Artificial Sequence
  EGFR VH-VL x I2C VH VL
caggtgcagctgcaggagtcgggcccaggactggtgaagccttcggagaccctgtccctcacctgcactgtctctggtggctccgtcagcagtggtgattactactggacctggatccggcagtccccagggaagggactggagtggattggacacatctattacagtgggaacaccaattataacccctccctcaagagccgactcaccatatcaattgacacgtccaagactcagttctccctgaagctgagttctgtgaccgctgcggacacggccatttattactgtgtgcgagatcgagtgactggtgcttttgatatctggggccaagggacaatggtcaccgtctcttccggtggtggtggttctggcggcggcggctccggtggtggtggttctgacatccagatgacccagtctccatcctccctgtctgcatctgtcggagacagagtcaccatcacttgccaggcgagtcaggacatcagcaactatttaaattggtatcagcagaaaccagggaaagcccctaaactcctgatctacgatgcatccaatttggaaacaggggtcccatcaaggttcagtggaagtggatctgggacagattttactttcaccatcagcagcctgcagcctgaagatattgcaacatatttctgtcaacactttgatcatctcccgctcgctttcggcggagggaccaaggtggagatcaaaggaggtggtggatccgaggtgcagctggtcgagtctggaggaggattggtgcagcctggagggtcattgaaactctcatgtgcagcctctggattcaccttcaataagtacgccatgaactgggtccgccaggctccaggaaagggtttggaatgggttgctcgcataagaagtaaatataataattatgcaacatattatgccgattcagtgaaagacaggttcaccatctccagagatgattcaaaaaacactgcctatctacaaatgaacaacttgaagactgaggacactgccgtgtactactgtgtgagacatgggaacttcggtaatagctacatatcctactgggcttactggggccaagggactctggtcaccgtctcctcaggtggtggtggttctggcggcggcggctccggtggtggtggttctcagactgttgtgactcaggaaccttcactcaccgtatcacctggtggaacagtcacactcacttgtggctcctcgactggggctgttacatctggcaactacccaaactgggtccaacaaaaaccaggtcaggcaccccgtggtctaataggtgggactaagttcctcgcccccggtactcctgccagattctcaggctccctgcttggaggcaaggctgccctcaccctctcaggggtacagccagaggatgaggcagaatattactgtgttctatggtacagcaaccgctgggtgttcggtggaggaaccaaactgactgtccta

SEQ ID NO: 391 - protein, 495 aa, Artificial Sequence
  EGFR VL-VH x I2C VH VL
DIQMTQSPSSLSASVGDRVTITCQASQDISNYLNWYQQKPGKAPKLLIYDASNLETGVPSRFSGSGSGTDFTFTISSLQPEDIATYFCQHFDHLPLAFGGGTKVEIKGGGGSGGGGSGGGGSQVQLQESGPGLVKPSETLSLTCTVSGGSVSSGDYYWTWIRQSPGKGLEWIGHIYYSGNTNYNPSLKSRLTISIDTSKTQFSLKLSSVTAADTAIYYCVRDRVTGAFDIWGQGTMVTVSSGGGGSEVQLVESGGGLVQPGGSLKLSCAASGFTFNKYAMNWVRQAPGKGLEWVARIRSKYNNYATYYADSVKDRFTISRDDSKNTAYLQMNNLKTEDTAVYYCVRHGNFGNSYISYWAYWGQGTLVTVSSGGGGSGGGGSGGGGSQTVVTQEPSLTVSPGGTVTLTCGSSTGAVTSGNYPNWVQQKPGQAPRGLIGGTKFLAPGTPARFSGSLLGGKAALTLSGVQPEDEAEYYCVLWYSNRWVFGGGTKLTVL

SEQ ID NO: 392 - DNA, 1485 bp, Artificial Sequence
  EGFR VL-VH x I2C VH VL
gacatccagatgacccagtctccatcctccctgtctgcatctgtcggagacagagtcaccatcacttgccaggcgagtcaggacatcagcaactatttaaattggtatcagcagaaaccagggaaagcccctaaactcctgatctacgatgcatccaatttggaaacaggggtcccatcaaggttcagtggaagtggatctgggacagattttactttcaccatcagcagcctgcagcctgaagatattgcaacatatttctgtcaacactttgatcatctcccgctcgctttcggcggagggaccaaggtggagatcaaaggtggtggtggttctggcggcggcggctccggtggtggtggttctcaggtgcagctgcaggagtcgggcccaggactggtgaagccttcggagaccctgtccctcacctgcactgtctctggtggctccgtcagcagtggtgattactactggacctggatccggcagtccccagggaagggactggagtggattggacacatctattacagtgggaacaccaattataacccctccctcaagagccgactcaccatatcaattgacacgtccaagactcagttctccctgaagctgagttctgtgaccgctgcggacacggccatttattactgtgtgcgagatcgagtgactggtgcttttgatatctggggccaagggacaatggtcaccgtctcttccggaggtggtggatccgaggtgcagctggtcgagtctggaggaggattggtgcagcctggagggtcattgaaactctcatgtgcagcctctggattcaccttcaataagtacgccatgaactgggtccgccaggctccaggaaagggtttggaatgggttgctcgcataagaagtaaatataataattatgcaacatattatgccgattcagtgaaagacaggttcaccatctccagagatgattcaaaaaacactgcctatctacaaatgaacaacttgaagactgaggacactgccgtgtactactgtgtgagacatgggaacttcggtaatagctacatatcctactgggcttactggggccaagggactctggtcaccgtctcctcaggtggtggtggttctggcggcggcggctccggtggtggtggttctcagactgttgtgactcaggaaccttcactcaccgtatcacctggtggaacagtcacactcacttgtggctcctcgactggggctgttacatctggcaactacccaaactgggtccaacaaaaaccaggtcaggcaccccgtggtctaataggtgggactaagttcctcgcccccggtactcctgccagattctcaggctccctgcttggaggcaaggctgccctcaccctctcaggggtacagccagaggatgaggcagaatattactgtgttctatggtacagcaaccgctgggtgttcggtggaggaaccaaactgactgtccta

SEQ ID NO: 393 - protein, 495 aa, Artificial Sequence
  EGFR VH-VL x F12Q VH VL
QVQLQESGPGLVKPSETLSLTCTVSGGSVSSGDYYWTWIRQSPGKGLEWIGHIYYSGNTNYNPSLKSRLTISIDTSKTQFSLKLSSVTAADTAIYYCVRDRVTGAFDIWGQGTMVTVSSGGGGSGGGGSGGGGSDIQMTQSPSSLSASVGDRVTITCQASQDISNYLNWYQQKPGKAPKLLIYDASNLETGVPSRFSGSGSGTDFTFTISSLQPEDIATYFCQHFDHLPLAFGGGTKVEIKGGGGSEVQLVESGGGLVQPGGSLKLSCAASGFTFNSYAMNWVRQAPGKGLEWVARIRSKYNNYATYYADSVKGRFTISRDDSKNTAYLQMNNLKTEDTAVYYCVRHGNFGNSYVSWWAYWGQGTLVTVSSGGGGSGGGGSGGGGSQTVVTQEPSLTVSPGGTVTLTCGSSTGAVTSGNYPNWVQQKPGQAPRGLIGGTKFLAPGTPARFSGSLLGGKAALTLSGVQPEDEAEYYCVLWYSNRWVFGGGTKLTVL

SEQ ID NO: 394 - DNA, 1485 bp, Artificial Sequence
  EGFR VH-VL x F12Q  VH VL
caggtgcagctgcaggagtcgggcccaggactggtgaagccttcggagaccctgtccctcacctgcactgtctctggtggctccgtcagcagtggtgattactactggacctggatccggcagtccccagggaagggactggagtggattggacacatctattacagtgggaacaccaattataacccctccctcaagagccgactcaccatatcaattgacacgtccaagactcagttctccctgaagctgagttctgtgaccgctgcggacacggccatttattactgtgtgcgagatcgagtgactggtgcttttgatatctggggccaagggacaatggtcaccgtctcttccggtggtggtggttctggcggcggcggctccggtggtggtggttctgacatccagatgacccagtctccatcctccctgtctgcatctgtcggagacagagtcaccatcacttgccaggcgagtcaggacatcagcaactatttaaattggtatcagcagaaaccagggaaagcccctaaactcctgatctacgatgcatccaatttggaaacaggggtcccatcaaggttcagtggaagtggatctgggacagattttactttcaccatcagcagcctgcagcctgaagatattgcaacatatttctgtcaacactttgatcatctcccgctcgctttcggcggagggaccaaggtggagatcaaaggaggtggtggatccgaggtgcagctggtcgagtctggaggaggattggtgcagcctggagggtcattgaaactctcatgtgcagcctctggattcaccttcaatagctacgccatgaactgggtccgccaggctccaggaaagggtttggaatgggttgctcgcataagaagtaaatataataattatgcaacatattatgccgattcagtgaaaggcaggttcaccatctccagagatgattcaaaaaacactgcctatctacaaatgaacaacttgaaaactgaggacactgccgtgtactactgtgtgagacatgggaacttcggtaatagctacgtttcctggtgggcttactggggccaagggactctggtcaccgtctcctcaggtggtggtggttctggcggcggcggctccggtggtggtggttctcagactgttgtgactcaggaaccttcactcaccgtatcacctggtggaacagtcacactcacttgtggctcctcgactggggctgttacatctggcaactacccaaactgggtccaacaaaaaccaggtcaggcaccccgtggtctaataggtgggactaagttcctcgcccccggtactcctgccagattctcaggctccctgcttggaggcaaggctgccctcaccctctcaggggtacagccagaggatgaggcagaatattactgtgttctatggtacagcaaccgctgggtgttcggtggaggaaccaaactgactgtccta

SEQ ID NO: 395 - protein, 495 aa, Artificial Sequence
  EGFR VL-VH x F12Q  VH VL
DIQMTQSPSSLSASVGDRVTITCQASQDISNYLNWYQQKPGKAPKLLIYDASNLETGVPSRFSGSGSGTDFTFTISSLQPEDIATYFCQHFDHLPLAFGGGTKVEIKGGGGSGGGGSGGGGSQVQLQESGPGLVKPSETLSLTCTVSGGSVSSGDYYWTWIRQSPGKGLEWIGHIYYSGNTNYNPSLKSRLTISIDTSKTQFSLKLSSVTAADTAIYYCVRDRVTGAFDIWGQGTMVTVSSGGGGSEVQLVESGGGLVQPGGSLKLSCAASGFTFNSYAMNWVRQAPGKGLEWVARIRSKYNNYATYYADSVKGRFTISRDDSKNTAYLQMNNLKTEDTAVYYCVRHGNFGNSYVSWWAYWGQGTLVTVSSGGGGSGGGGSGGGGSQTVVTQEPSLTVSPGGTVTLTCGSSTGAVTSGNYPNWVQQKPGQAPRGLIGGTKFLAPGTPARFSGSLLGGKAALTLSGVQPEDEAEYYCVLWYSNRWVFGGGTKLTVL

SEQ ID NO: 396 - DNA, 1485 bp, Artificial Sequence
  EGFR VL-VH x F12Q  VH VL
gacatccagatgacccagtctccatcctccctgtctgcatctgtcggagacagagtcaccatcacttgccaggcgagtcaggacatcagcaactatttaaattggtatcagcagaaaccagggaaagcccctaaactcctgatctacgatgcatccaatttggaaacaggggtcccatcaaggttcagtggaagtggatctgggacagattttactttcaccatcagcagcctgcagcctgaagatattgcaacatatttctgtcaacactttgatcatctcccgctcgctttcggcggagggaccaaggtggagatcaaaggtggtggtggttctggcggcggcggctccggtggtggtggttctcaggtgcagctgcaggagtcgggcccaggactggtgaagccttcggagaccctgtccctcacctgcactgtctctggtggctccgtcagcagtggtgattactactggacctggatccggcagtccccagggaagggactggagtggattggacacatctattacagtgggaacaccaattataacccctccctcaagagccgactcaccatatcaattgacacgtccaagactcagttctccctgaagctgagttctgtgaccgctgcggacacggccatttattactgtgtgcgagatcgagtgactggtgcttttgatatctggggccaagggacaatggtcaccgtctcttccggaggtggtggatccgaggtgcagctggtcgagtctggaggaggattggtgcagcctggagggtcattgaaactctcatgtgcagcctctggattcaccttcaatagctacgccatgaactgggtccgccaggctccaggaaagggtttggaatgggttgctcgcataagaagtaaatataataattatgcaacatattatgccgattcagtgaaaggcaggttcaccatctccagagatgattcaaaaaacactgcctatctacaaatgaacaacttgaaaactgaggacactgccgtgtactactgtgtgagacatgggaacttcggtaatagctacgtttcctggtgggcttactggggccaagggactctggtcaccgtctcctcaggtggtggtggttctggcggcggcggctccggtggtggtggttctcagactgttgtgactcaggaaccttcactcaccgtatcacctggtggaacagtcacactcacttgtggctcctcgactggggctgttacatctggcaactacccaaactgggtccaacaaaaaccaggtcaggcaccccgtggtctaataggtgggactaagttcctcgcccccggtactcctgccagattctcaggctccctgcttggaggcaaggctgccctcaccctctcaggggtacagccagaggatgaggcagaatattactgtgttctatggtacagcaaccgctgggtgttcggtggaggaaccaaactgactgtccta

SEQ ID NO: 397 - protein, 495 aa, Artificial Sequence
  EGFR VH-VL x H2C VH VL
QVQLQESGPGLVKPSETLSLTCTVSGGSVSSGDYYWTWIRQSPGKGLEWIGHIYYSGNTNYNPSLKSRLTISIDTSKTQFSLKLSSVTAADTAIYYCVRDRVTGAFDIWGQGTMVTVSSGGGGSGGGGSGGGGSDIQMTQSPSSLSASVGDRVTITCQASQDISNYLNWYQQKPGKAPKLLIYDASNLETGVPSRFSGSGSGTDFTFTISSLQPEDIATYFCQHFDHLPLAFGGGTKVEIKGGGGSEVQLVESGGGLVQPGGSLKLSCAASGFTFNKYAMNWVRQAPGKGLEWVARIRSKYNNYATYYADSVKDRFTISRDDSKNTAYLQMNNLKTEDTAVYYCVRHGNFGNSYISYWAYWGQGTLVTVSSGGGGSGGGGSGGGGSQTVVTQEPSLTVSPGGTVTLTCGSSTGAVTSGYYPNWVQQKPGQAPRGLIGGTKFLAPGTPARFSGSLLGGKAALTLSGVQPEDEAEYYCALWYSNRWVFGGGTKLTVL

SEQ ID NO: 398 - DNA, 1485 bp, Artificial Sequence
  EGFR VH-VL x H2C  VH VL
caggtgcagctgcaggagtcgggcccaggactggtgaagccttcggagaccctgtccctcacctgcactgtctctggtggctccgtcagcagtggtgattactactggacctggatccggcagtccccagggaagggactggagtggattggacacatctattacagtgggaacaccaattataacccctccctcaagagccgactcaccatatcaattgacacgtccaagactcagttctccctgaagctgagttctgtgaccgctgcggacacggccatttattactgtgtgcgagatcgagtgactggtgcttttgatatctggggccaagggacaatggtcaccgtctcttccggtggtggtggttctggcggcggcggctccggtggtggtggttctgacatccagatgacccagtctccatcctccctgtctgcatctgtcggagacagagtcaccatcacttgccaggcgagtcaggacatcagcaactatttaaattggtatcagcagaaaccagggaaagcccctaaactcctgatctacgatgcatccaatttggaaacaggggtcccatcaaggttcagtggaagtggatctgggacagattttactttcaccatcagcagcctgcagcctgaagatattgcaacatatttctgtcaacactttgatcatctcccgctcgctttcggcggagggaccaaggtggagatcaaaggaggtggtggatccgaggtgcagctggtcgagtctggaggaggattggtgcagcctggagggtcattgaaactctcatgtgcagcctctggattcaccttcaataagtacgccatgaactgggtccgccaggctccaggaaagggtttggaatgggttgctcgcataagaagtaaatataataattatgcaacatattatgccgattcagtgaaagacaggttcaccatctccagagatgattcaaaaaacactgcctatctacaaatgaacaacttgaaaactgaggacactgccgtgtactactgtgtgagacatgggaacttcggtaatagctacatatcctactgggcttactggggccaagggactctggtcaccgtctcctcaggtggtggtggttctggcggcggcggctccggtggtggtggttctcagactgttgtgactcaggaaccttcactcaccgtatcacctggtggaacagtcacactcacttgtggctcctcgactggggctgttacatctggctactacccaaactgggtccaacaaaaaccaggtcaggcaccccgtggtctaataggtgggactaagttcctcgcccccggtactcctgccagattctcaggctccctgcttggaggcaaggctgccctcaccctctcaggggtacagccagaggatgaggcagaatattactgtgctctatggtacagcaaccgctgggtgttcggtggaggaaccaaactgactgtccta

SEQ ID NO: 399 - protein, 495 aa, Artificial Sequence
  EGFR VL-VH x H2C  VH VL
DIQMTQSPSSLSASVGDRVTITCQASQDISNYLNWYQQKPGKAPKLLIYDASNLETGVPSRFSGSGSGTDFTFTISSLQPEDIATYFCQHFDHLPLAFGGGTKVEIKGGGGSGGGGSGGGGSQVQLQESGPGLVKPSETLSLTCTVSGGSVSSGDYYWTWIRQSPGKGLEWIGHIYYSGNTNYNPSLKSRLTISIDTSKTQFSLKLSSVTAADTAIYYCVRDRVTGAFDIWGQGTMVTVSSGGGGSEVQLVESGGGLVQPGGSLKLSCAASGFTFNKYAMNWVRQAPGKGLEWVARIRSKYNNYATYYADSVKDRFTISRDDSKNTAYLQMNNLKTEDTAVYYCVRHGNFGNSYISYWAYWGQGTLVTVSSGGGGSGGGGSGGGGSQTVVTQEPSLTVSPGGTVTLTCGSSTGAVTSGYYPNWVQQKPGQAPRGLIGGTKFLAPGTPARFSGSLLGGKAALTLSGVQPEDEAEYYCALWYSNRWVFGGGTKLTVL

SEQ ID NO: 400 - DNA, 1485 bp, Artificial Sequence
  EGFR VL-VH x H2C  VH VL
gacatccagatgacccagtctccatcctccctgtctgcatctgtcggagacagagtcaccatcacttgccaggcgagtcaggacatcagcaactatttaaattggtatcagcagaaaccagggaaagcccctaaactcctgatctacgatgcatccaatttggaaacaggggtcccatcaaggttcagtggaagtggatctgggacagattttactttcaccatcagcagcctgcagcctgaagatattgcaacatatttctgtcaacactttgatcatctcccgctcgctttcggcggagggaccaaggtggagatcaaaggtggtggtggttctggcggcggcggctccggtggtggtggttctcaggtgcagctgcaggagtcgggcccaggactggtgaagccttcggagaccctgtccctcacctgcactgtctctggtggctccgtcagcagtggtgattactactggacctggatccggcagtccccagggaagggactggagtggattggacacatctattacagtgggaacaccaattataacccctccctcaagagccgactcaccatatcaattgacacgtccaagactcagttctccctgaagctgagttctgtgaccgctgcggacacggccatttattactgtgtgcgagatcgagtgactggtgcttttgatatctggggccaagggacaatggtcaccgtctcttccggaggtggtggatccgaggtgcagctggtcgagtctggaggaggattggtgcagcctggagggtcattgaaactctcatgtgcagcctctggattcaccttcaataagtacgccatgaactgggtccgccaggctccaggaaagggtttggaatgggttgctcgcataagaagtaaatataataattatgcaacatattatgccgattcagtgaaagacaggttcaccatctccagagatgattcaaaaaacactgcctatctacaaatgaacaacttgaaaactgaggacactgccgtgtactactgtgtgagacatgggaacttcggtaatagctacatatcctactgggcttactggggccaagggactctggtcaccgtctcctcaggtggtggtggttctggcggcggcggctccggtggtggtggttctcagactgttgtgactcaggaaccttcactcaccgtatcacctggtggaacagtcacactcacttgtggctcctcgactggggctgttacatctggctactacccaaactgggtccaacaaaaaccaggtcaggcaccccgtggtctaataggtgggactaagttcctcgcccccggtactcctgccagattctcaggctccctgcttggaggcaaggctgccctcaccctctcaggggtacagccagaggatgaggcagaatattactgtgctctatggtacagcaaccgctgggtgttcggtggaggaaccaaactgactgtccta

SEQ ID NO: 401 - protein, 119 aa, Artificial Sequence
  VH of EGFR
QVQLKQSGPGLVQPSQSLSITCTVSGFSLTNYGVHWVRQSPGKGLEWLGVIWSGGNTDYNTPFTSRLSINKDNSKSQVFFKMNSLQSNDTAIYYCARALTYYDYEFAYWGQGTLVTVSS

SEQ ID NO: 402 - DNA, 357 bp, Artificial Sequence
  VH of EGFR
caggtgcagctgaagcagtcaggacctggcctagtgcagccctcacagagcctgtccatcacctgcacagtctctggtttctcattaactaactatggagtacactgggttcgccagtctccaggaaagggtctggagtggctgggagtgatatggagtggtggaaacacagactataatacacctttcacatccagactgagcatcaacaaggacaattccaagagccaagttttctttaaaatgaacagtctgcaatctaatgacacagccatatattactgtgccagagccctgacctattatgactacgagttcgcctattggggtcagggaaccctggttaccgtgtcttcc

SEQ ID NO: 403 - protein, 107 aa, Artificial Sequence
  VL of EGFR
DILLTQSPVILSVSPGERVSFSCRASQSIGTNIHWYQQRTNGSPRLLIKYASESISGIPSRFSGSGSGTDFTLSINSVESEDIADYYCQQNNNWPTTFGAGTKLELK

SEQ ID NO: 404 - DNA, 321 bp, Artificial Sequence
  VL of EGFR
gacatcttgctgactcagtctccagtcatcctgtctgtgagtccaggagaaagagtcagtttctcctgcagggccagtcagagcattggcacaaacatacactggtatcagcaaagaacaaatggttctccaaggcttctcataaagtatgcttctgagtctatctctgggatcccttccaggtttagtggcagtggatcagggacagattttactcttagcatcaacagtgtggagtctgaagatattgcagattattactgtcaacaaaataataactggccaaccacatttggtgcaggaacaaagctggaactgaaa

SEQ ID NO: 405 - protein, 241 aa, Artificial Sequence
  VH-VL of EGFR
QVQLKQSGPGLVQPSQSLSITCTVSGFSLTNYGVHWVRQSPGKGLEWLGVIWSGGNTDYNTPFTSRLSINKDNSKSQVFFKMNSLQSNDTAIYYCARALTYYDYEFAYWGQGTLVTVSSGGGGSGGGGSGGGGSDILLTQSPVILSVSPGERVSFSCRASQSIGTNIHWYQQRTNGSPRLLIKYASESISGIPSRFSGSGSGTDFTLSINSVESEDIADYYCQQNNNWPTTFGAGTKLELK

SEQ ID NO: 406 - DNA, 723 bp, Artificial Sequence
  VH-VL of EGFR
caggtgcagctgaagcagtcaggacctggcctagtgcagccctcacagagcctgtccatcacctgcacagtctctggtttctcattaactaactatggagtacactgggttcgccagtctccaggaaagggtctggagtggctgggagtgatatggagtggtggaaacacagactataatacacctttcacatccagactgagcatcaacaaggacaattccaagagccaagttttctttaaaatgaacagtctgcaatctaatgacacagccatatattactgtgccagagccctgacctattatgactacgagttcgcctattggggtcagggaaccctggttaccgtgtcttccggtggtggtggttctggcggcggcggctccggtggtggtggttctgacatcttgctgactcagtctccagtcatcctgtctgtgagtccaggagaaagagtcagtttctcctgcagggccagtcagagcattggcacaaacatacactggtatcagcaaagaacaaatggttctccaaggcttctcataaagtatgcttctgagtctatctctgggatcccttccaggtttagtggcagtggatcagggacagattttactcttagcatcaacagtgtggagtctgaagatattgcagattattactgtcaacaaaataataactggccaaccacatttggtgcaggaacaaagctggaactgaaa

SEQ ID NO: 407 - protein, 241 aa, Artificial Sequence
  VL-VH of EGFR
DILLTQSPVILSVSPGERVSFSCRASQSIGTNIHWYQQRTNGSPRLLIKYASESISGIPSRFSGSGSGTDFTLSINSVESEDIADYYCQQNNNWPTTFGAGTKLELKGGGGSGGGGSGGGGSQVQLKQSGPGLVQPSQSLSITCTVSGFSLTNYGVHWVRQSPGKGLEWLGVIWSGGNTDYNTPFTSRLSINKDNSKSQVFFKMNSLQSNDTAIYYCARALTYYDYEFAYWGQGTLVTVSS

SEQ ID NO: 408 - DNA, 723 bp, Artificial Sequence
  VL-VH of EGFR
gacatcttgctgactcagtctccagtcatcctgtctgtgagtccaggagaaagagtcagtttctcctgcagggccagtcagagcattggcacaaacatacactggtatcagcaaagaacaaatggttctccaaggcttctcataaagtatgcttctgagtctatctctgggatcccttccaggtttagtggcagtggatcagggacagattttactcttagcatcaacagtgtggagtctgaagatattgcagattattactgtcaacaaaataataactggccaaccacatttggtgcaggaacaaagctggaactgaaaggtggtggtggttctggcggcggcggctccggtggtggtggttctcaggtgcagctgaagcagtcaggacctggcctagtgcagccctcacagagcctgtccatcacctgcacagtctctggtttctcattaactaactatggagtacactgggttcgccagtctccaggaaagggtctggagtggctgggagtgatatggagtggtggaaacacagactataatacacctttcacatccagactgagcatcaacaaggacaattccaagagccaagttttctttaaaatgaacagtctgcaatctaatgacacagccatatattactgtgccagagccctgacctattatgactacgagttcgcctattggggtcagggaaccctggttaccgtgtcttcc

SEQ ID NO: 409 - protein, 495 aa, Artificial Sequence
  EGFR VH-VL x I2C VH VL
QVQLKQSGPGLVQPSQSLSITCTVSGFSLTNYGVHWVRQSPGKGLEWLGVIWSGGNTDYNTPFTSRLSINKDNSKSQVFFKMNSLQSNDTAIYYCARALTYYDYEFAYWGQGTLVTVSSGGGGSGGGGSGGGGSDILLTQSPVILSVSPGERVSFSCRASQSIGTNIHWYQQRTNGSPRLLIKYASESISGIPSRFSGSGSGTDFTLSINSVESEDIADYYCQQNNNWPTTFGAGTKLELKGGGGSEVQLVESGGGLVQPGGSLKLSCAASGFTFNKYAMNWVRQAPGKGLEWVARIRSKYNNYATYYADSVKDRFTISRDDSKNTAYLQMNNLKTEDTAVYYCVRHGNFGNSYISYWAYWGQGTLVTVSSGGGGSGGGGSGGGGSQTVVTQEPSLTVSPGGTVTLTCGSSTGAVTSGNYPNWVQQKPGQAPRGLIGGTKFLAPGTPARFSGSLLGGKAALTLSGVQPEDEAEYYCVLWYSNRWVFGGGTKLTVL

SEQ ID NO: 410 - DNA, 1485 bp, Artificial Sequence
  EGFR VH-VL x I2C VH VL
caggtgcagctgaagcagtcaggacctggcctagtgcagccctcacagagcctgtccatcacctgcacagtctctggtttctcattaactaactatggagtacactgggttcgccagtctccaggaaagggtctggagtggctgggagtgatatggagtggtggaaacacagactataatacacctttcacatccagactgagcatcaacaaggacaattccaagagccaagttttctttaaaatgaacagtctgcaatctaatgacacagccatatattactgtgccagagccctgacctattatgactacgagttcgcctattggggtcagggaaccctggttaccgtgtcttccggtggtggtggttctggcggcggcggctccggtggtggtggttctgacatcttgctgactcagtctccagtcatcctgtctgtgagtccaggagaaagagtcagtttctcctgcagggccagtcagagcattggcacaaacatacactggtatcagcaaagaacaaatggttctccaaggcttctcataaagtatgcttctgagtctatctctgggatcccttccaggtttagtggcagtggatcagggacagattttactcttagcatcaacagtgtggagtctgaagatattgcagattattactgtcaacaaaataataactggccaaccacatttggtgcaggaacaaagctggaactgaaaggaggtggtggatccgaggtgcagctggtcgagtctggaggaggattggtgcagcctggagggtcattgaaactctcatgtgcagcctctggattcaccttcaataagtacgccatgaactgggtccgccaggctccaggaaagggtttggaatgggttgctcgcataagaagtaaatataataattatgcaacatattatgccgattcagtgaaagacaggttcaccatctccagagatgattcaaaaaacactgcctatctacaaatgaacaacttgaagactgaggacactgccgtgtactactgtgtgagacatgggaacttcggtaatagctacatatcctactgggcttactggggccaagggactctggtcaccgtctcctcaggtggtggtggttctggcggcggcggctccggtggtggtggttctcagactgttgtgactcaggaaccttcactcaccgtatcacctggtggaacagtcacactcacttgtggctcctcgactggggctgttacatctggcaactacccaaactgggtccaacaaaaaccaggtcaggcaccccgtggtctaataggtgggactaagttcctcgcccccggtactcctgccagattctcaggctccctgcttggaggcaaggctgccctcaccctctcaggggtacagccagaggatgaggcagaatattactgtgttctatggtacagcaaccgctgggtgttcggtggaggaaccaaactgactgtccta

SEQ ID NO: 411 - protein, 495 aa, Artificial Sequence
  EGFR VL-VH x I2C VH VL
DILLTQSPVILSVSPGERVSFSCRASQSIGTNIHWYQQRTNGSPRLLIKYASESISGIPSRFSGSGSGTDFTLSINSVESEDIADYYCQQNNNWPTTFGAGTKLELKGGGGSGGGGSGGGGSQVQLKQSGPGLVQPSQSLSITCTVSGFSLTNYGVHWVRQSPGKGLEWLGVIWSGGNTDYNTPFTSRLSINKDNSKSQVFFKMNSLQSNDTAIYYCARALTYYDYEFAYWGQGTLVTVSSGGGGSEVQLVESGGGLVQPGGSLKLSCAASGFTFNKYAMNWVRQAPGKGLEWVARIRSKYNNYATYYADSVKDRFTISRDDSKNTAYLQMNNLKTEDTAVYYCVRHGNFGNSYISYWAYWGQGTLVTVSSGGGGSGGGGSGGGGSQTVVTQEPSLTVSPGGTVTLTCGSSTGAVTSGNYPNWVQQKPGQAPRGLIGGTKFLAPGTPARFSGSLLGGKAALTLSGVQPEDEAEYYCVLWYSNRWVFGGGTKLTVL

SEQ ID NO: 412 - DNA, 1485 bp, Artificial Sequence
  EGFR VL-VH x I2C VH VL
gacatcttgctgactcagtctccagtcatcctgtctgtgagtccaggagaaagagtcagtttctcctgcagggccagtcagagcattggcacaaacatacactggtatcagcaaagaacaaatggttctccaaggcttctcataaagtatgcttctgagtctatctctgggatcccttccaggtttagtggcagtggatcagggacagattttactcttagcatcaacagtgtggagtctgaagatattgcagattattactgtcaacaaaataataactggccaaccacatttggtgcaggaacaaagctggaactgaaaggtggtggtggttctggcggcggcggctccggtggtggtggttctcaggtgcagctgaagcagtcaggacctggcctagtgcagccctcacagagcctgtccatcacctgcacagtctctggtttctcattaactaactatggagtacactgggttcgccagtctccaggaaagggtctggagtggctgggagtgatatggagtggtggaaacacagactataatacacctttcacatccagactgagcatcaacaaggacaattccaagagccaagttttctttaaaatgaacagtctgcaatctaatgacacagccatatattactgtgccagagccctgacctattatgactacgagttcgcctattggggtcagggaaccctggttaccgtgtcttccggaggtggtggatccgaggtgcagctggtcgagtctggaggaggattggtgcagcctggagggtcattgaaactctcatgtgcagcctctggattcaccttcaataagtacgccatgaactgggtccgccaggctccaggaaagggtttggaatgggttgctcgcataagaagtaaatataataattatgcaacatattatgccgattcagtgaaagacaggttcaccatctccagagatgattcaaaaaacactgcctatctacaaatgaacaacttgaagactgaggacactgccgtgtactactgtgtgagacatgggaacttcggtaatagctacatatcctactgggcttactggggccaagggactctggtcaccgtctcctcaggtggtggtggttctggcggcggcggctccggtggtggtggttctcagactgttgtgactcaggaaccttcactcaccgtatcacctggtggaacagtcacactcacttgtggctcctcgactggggctgttacatctggcaactacccaaactgggtccaacaaaaaccaggtcaggcaccccgtggtctaataggtgggactaagttcctcgcccccggtactcctgccagattctcaggctccctgcttggaggcaaggctgccctcaccctctcaggggtacagccagaggatgaggcagaatattactgtgttctatggtacagcaaccgctgggtgttcggtggaggaaccaaactgactgtccta

SEQ ID NO: 413 - protein, 495 aa, Artificial Sequence
  EGFR VH-VL x F12Q VH VL
QVQLKQSGPGLVQPSQSLSITCTVSGFSLTNYGVHWVRQSPGKGLEWLGVIWSGGNTDYNTPFTSRLSINKDNSKSQVFFKMNSLQSNDTAIYYCARALTYYDYEFAYWGQGTLVTVSSGGGGSGGGGSGGGGSDILLTQSPVILSVSPGERVSFSCRASQSIGTNIHWYQQRTNGSPRLLIKYASESISGIPSRFSGSGSGTDFTLSINSVESEDIADYYCQQNNNWPTTFGAGTKLELKGGGGSEVQLVESGGGLVQPGGSLKLSCAASGFTFNSYAMNWVRQAPGKGLEWVARIRSKYNNYATYYADSVKGRFTISRDDSKNTAYLQMNNLKTEDTAVYYCVRHGNFGNSYVSWWAYWGQGTLVTVSSGGGGSGGGGSGGGGSQTVVTQEPSLTVSPGGTVTLTCGSSTGAVTSGNYPNWVQQKPGQAPRGLIGGTKFLAPGTPARFSGSLLGGKAALTLSGVQPEDEAEYYCVLWYSNRWVFGGGTKLTVL

SEQ ID NO: 414 - DNA, 1485 bp, Artificial Sequence
  EGFR VH-VL x F12Q  VH VL
caggtgcagctgaagcagtcaggacctggcctagtgcagccctcacagagcctgtccatcacctgcacagtctctggtttctcattaactaactatggagtacactgggttcgccagtctccaggaaagggtctggagtggctgggagtgatatggagtggtggaaacacagactataatacacctttcacatccagactgagcatcaacaaggacaattccaagagccaagttttctttaaaatgaacagtctgcaatctaatgacacagccatatattactgtgccagagccctgacctattatgactacgagttcgcctattggggtcagggaaccctggttaccgtgtcttccggtggtggtggttctggcggcggcggctccggtggtggtggttctgacatcttgctgactcagtctccagtcatcctgtctgtgagtccaggagaaagagtcagtttctcctgcagggccagtcagagcattggcacaaacatacactggtatcagcaaagaacaaatggttctccaaggcttctcataaagtatgcttctgagtctatctctgggatcccttccaggtttagtggcagtggatcagggacagattttactcttagcatcaacagtgtggagtctgaagatattgcagattattactgtcaacaaaataataactggccaaccacatttggtgcaggaacaaagctggaactgaaaggaggtggtggatccgaggtgcagctggtcgagtctggaggaggattggtgcagcctggagggtcattgaaactctcatgtgcagcctctggattcaccttcaatagctacgccatgaactgggtccgccaggctccaggaaagggtttggaatgggttgctcgcataagaagtaaatataataattatgcaacatattatgccgattcagtgaaaggcaggttcaccatctccagagatgattcaaaaaacactgcctatctacaaatgaacaacttgaaaactgaggacactgccgtgtactactgtgtgagacatgggaacttcggtaatagctacgtttcctggtgggcttactggggccaagggactctggtcaccgtctcctcaggtggtggtggttctggcggcggcggctccggtggtggtggttctcagactgttgtgactcaggaaccttcactcaccgtatcacctggtggaacagtcacactcacttgtggctcctcgactggggctgttacatctggcaactacccaaactgggtccaacaaaaaccaggtcaggcaccccgtggtctaataggtgggactaagttcctcgcccccggtactcctgccagattctcaggctccctgcttggaggcaaggctgccctcaccctctcaggggtacagccagaggatgaggcagaatattactgtgttctatggtacagcaaccgctgggtgttcggtggaggaaccaaactgactgtccta

SEQ ID NO: 415 - protein, 495 aa, Artificial Sequence
  EGFR VL-VH x F12Q  VH VL
DILLTQSPVILSVSPGERVSFSCRASQSIGTNIHWYQQRTNGSPRLLIKYASESISGIPSRFSGSGSGTDFTLSINSVESEDIADYYCQQNNNWPTTFGAGTKLELKGGGGSGGGGSGGGGSQVQLKQSGPGLVQPSQSLSITCTVSGFSLTNYGVHWVRQSPGKGLEWLGVIWSGGNTDYNTPFTSRLSINKDNSKSQVFFKMNSLQSNDTAIYYCARALTYYDYEFAYWGQGTLVTVSSGGGGSEVQLVESGGGLVQPGGSLKLSCAASGFTFNSYAMNWVRQAPGKGLEWVARIRSKYNNYATYYADSVKGRFTISRDDSKNTAYLQMNNLKTEDTAVYYCVRHGNFGNSYVSWWAYWGQGTLVTVSSGGGGSGGGGSGGGGSQTVVTQEPSLTVSPGGTVTLTCGSSTGAVTSGNYPNWVQQKPGQAPRGLIGGTKFLAPGTPARFSGSLLGGKAALTLSGVQPEDEAEYYCVLWYSNRWVFGGGTKLTVL

SEQ ID NO: 416 - DNA, 1485 bp, Artificial Sequence
  EGFR VL-VH x F12Q  VH VL
gacatcttgctgactcagtctccagtcatcctgtctgtgagtccaggagaaagagtcagtttctcctgcagggccagtcagagcattggcacaaacatacactggtatcagcaaagaacaaatggttctccaaggcttctcataaagtatgcttctgagtctatctctgggatcccttccaggtttagtggcagtggatcagggacagattttactcttagcatcaacagtgtggagtctgaagatattgcagattattactgtcaacaaaataataactggccaaccacatttggtgcaggaacaaagctggaactgaaaggtggtggtggttctggcggcggcggctccggtggtggtggttctcaggtgcagctgaagcagtcaggacctggcctagtgcagccctcacagagcctgtccatcacctgcacagtctctggtttctcattaactaactatggagtacactgggttcgccagtctccaggaaagggtctggagtggctgggagtgatatggagtggtggaaacacagactataatacacctttcacatccagactgagcatcaacaaggacaattccaagagccaagttttctttaaaatgaacagtctgcaatctaatgacacagccatatattactgtgccagagccctgacctattatgactacgagttcgcctattggggtcagggaaccctggttaccgtgtcttccggaggtggtggatccgaggtgcagctggtcgagtctggaggaggattggtgcagcctggagggtcattgaaactctcatgtgcagcctctggattcaccttcaatagctacgccatgaactgggtccgccaggctccaggaaagggtttggaatgggttgctcgcataagaagtaaatataataattatgcaacatattatgccgattcagtgaaaggcaggttcaccatctccagagatgattcaaaaaacactgcctatctacaaatgaacaacttgaaaactgaggacactgccgtgtactactgtgtgagacatgggaacttcggtaatagctacgtttcctggtgggcttactggggccaagggactctggtcaccgtctcctcaggtggtggtggttctggcggcggcggctccggtggtggtggttctcagactgttgtgactcaggaaccttcactcaccgtatcacctggtggaacagtcacactcacttgtggctcctcgactggggctgttacatctggcaactacccaaactgggtccaacaaaaaccaggtcaggcaccccgtggtctaataggtgggactaagttcctcgcccccggtactcctgccagattctcaggctccctgcttggaggcaaggctgccctcaccctctcaggggtacagccagaggatgaggcagaatattactgtgttctatggtacagcaaccgctgggtgttcggtggaggaaccaaactgactgtccta

SEQ ID NO: 417 - protein, 495 aa, Artificial Sequence
  EGFR VH-VL x H2C VH VL
QVQLKQSGPGLVQPSQSLSITCTVSGFSLTNYGVHWVRQSPGKGLEWLGVIWSGGNTDYNTPFTSRLSINKDNSKSQVFFKMNSLQSNDTAIYYCARALTYYDYEFAYWGQGTLVTVSSGGGGSGGGGSGGGGSDILLTQSPVILSVSPGERVSFSCRASQSIGTNIHWYQQRTNGSPRLLIKYASESISGIPSRFSGSGSGTDFTLSINSVESEDIADYYCQQNNNWPTTFGAGTKLELKGGGGSEVQLVESGGGLVQPGGSLKLSCAASGFTFNKYAMNWVRQAPGKGLEWVARIRSKYNNYATYYADSVKDRFTISRDDSKNTAYLQMNNLKTEDTAVYYCVRHGNFGNSYISYWAYWGQGTLVTVSSGGGGSGGGGSGGGGSQTVVTQEPSLTVSPGGTVTLTCGSSTGAVTSGYYPNWVQQKPGQAPRGLIGGTKFLAPGTPARFSGSLLGGKAALTLSGVQPEDEAEYYCALWYSNRWVFGGGTKLTVL

SEQ ID NO: 418 - DNA, 1485 bp, Artificial Sequence
  EGFR VH-VL x H2C  VH VL
caggtgcagctgaagcagtcaggacctggcctagtgcagccctcacagagcctgtccatcacctgcacagtctctggtttctcattaactaactatggagtacactgggttcgccagtctccaggaaagggtctggagtggctgggagtgatatggagtggtggaaacacagactataatacacctttcacatccagactgagcatcaacaaggacaattccaagagccaagttttctttaaaatgaacagtctgcaatctaatgacacagccatatattactgtgccagagccctgacctattatgactacgagttcgcctattggggtcagggaaccctggttaccgtgtcttccggtggtggtggttctggcggcggcggctccggtggtggtggttctgacatcttgctgactcagtctccagtcatcctgtctgtgagtccaggagaaagagtcagtttctcctgcagggccagtcagagcattggcacaaacatacactggtatcagcaaagaacaaatggttctccaaggcttctcataaagtatgcttctgagtctatctctgggatcccttccaggtttagtggcagtggatcagggacagattttactcttagcatcaacagtgtggagtctgaagatattgcagattattactgtcaacaaaataataactggccaaccacatttggtgcaggaacaaagctggaactgaaaggaggtggtggatccgaggtgcagctggtcgagtctggaggaggattggtgcagcctggagggtcattgaaactctcatgtgcagcctctggattcaccttcaataagtacgccatgaactgggtccgccaggctccaggaaagggtttggaatgggttgctcgcataagaagtaaatataataattatgcaacatattatgccgattcagtgaaagacaggttcaccatctccagagatgattcaaaaaacactgcctatctacaaatgaacaacttgaaaactgaggacactgccgtgtactactgtgtgagacatgggaacttcggtaatagctacatatcctactgggcttactggggccaagggactctggtcaccgtctcctcaggtggtggtggttctggcggcggcggctccggtggtggtggttctcagactgttgtgactcaggaaccttcactcaccgtatcacctggtggaacagtcacactcacttgtggctcctcgactggggctgttacatctggctactacccaaactgggtccaacaaaaaccaggtcaggcaccccgtggtctaataggtgggactaagttcctcgcccccggtactcctgccagattctcaggctccctgcttggaggcaaggctgccctcaccctctcaggggtacagccagaggatgaggcagaatattactgtgctctatggtacagcaaccgctgggtgttcggtggaggaaccaaactgactgtccta

SEQ ID NO: 419 - protein, 495 aa, Artificial Sequence
  EGFR VL-VH x H2C  VH VL
DILLTQSPVILSVSPGERVSFSCRASQSIGTNIHWYQQRTNGSPRLLIKYASESISGIPSRFSGSGSGTDFTLSINSVESEDIADYYCQQNNNWPTTFGAGTKLELKGGGGSGGGGSGGGGSQVQLKQSGPGLVQPSQSLSITCTVSGFSLTNYGVHWVRQSPGKGLEWLGVIWSGGNTDYNTPFTSRLSINKDNSKSQVFFKMNSLQSNDTAIYYCARALTYYDYEFAYWGQGTLVTVSSGGGGSEVQLVESGGGLVQPGGSLKLSCAASGFTFNKYAMNWVRQAPGKGLEWVARIRSKYNNYATYYADSVKDRFTISRDDSKNTAYLQMNNLKTEDTAVYYCVRHGNFGNSYISYWAYWGQGTLVTVSSGGGGSGGGGSGGGGSQTVVTQEPSLTVSPGGTVTLTCGSSTGAVTSGYYPNWVQQKPGQAPRGLIGGTKFLAPGTPARFSGSLLGGKAALTLSGVQPEDEAEYYCALWYSNRWVFGGGTKLTVL

SEQ ID NO: 420 - DNA, 1485 bp, Artificial Sequence
  EGFR VL-VH x H2C  VH VL
gacatcttgctgactcagtctccagtcatcctgtctgtgagtccaggagaaagagtcagtttctcctgcagggccagtcagagcattggcacaaacatacactggtatcagcaaagaacaaatggttctccaaggcttctcataaagtatgcttctgagtctatctctgggatcccttccaggtttagtggcagtggatcagggacagattttactcttagcatcaacagtgtggagtctgaagatattgcagattattactgtcaacaaaataataactggccaaccacatttggtgcaggaacaaagctggaactgaaaggtggtggtggttctggcggcggcggctccggtggtggtggttctcaggtgcagctgaagcagtcaggacctggcctagtgcagccctcacagagcctgtccatcacctgcacagtctctggtttctcattaactaactatggagtacactgggttcgccagtctccaggaaagggtctggagtggctgggagtgatatggagtggtggaaacacagactataatacacctttcacatccagactgagcatcaacaaggacaattccaagagccaagttttctttaaaatgaacagtctgcaatctaatgacacagccatatattactgtgccagagccctgacctattatgactacgagttcgcctattggggtcagggaaccctggttaccgtgtcttccggaggtggtggatccgaggtgcagctggtcgagtctggaggaggattggtgcagcctggagggtcattgaaactctcatgtgcagcctctggattcaccttcaataagtacgccatgaactgggtccgccaggctccaggaaagggtttggaatgggttgctcgcataagaagtaaatataataattatgcaacatattatgccgattcagtgaaagacaggttcaccatctccagagatgattcaaaaaacactgcctatctacaaatgaacaacttgaaaactgaggacactgccgtgtactactgtgtgagacatgggaacttcggtaatagctacatatcctactgggcttactggggccaagggactctggtcaccgtctcctcaggtggtggtggttctggcggcggcggctccggtggtggtggttctcagactgttgtgactcaggaaccttcactcaccgtatcacctggtggaacagtcacactcacttgtggctcctcgactggggctgttacatctggctactacccaaactgggtccaacaaaaaccaggtcaggcaccccgtggtctaataggtgggactaagttcctcgcccccggtactcctgccagattctcaggctccctgcttggaggcaaggctgccctcaccctctcaggggtacagccagaggatgaggcagaatattactgtgctctatggtacagcaaccgctgggtgttcggtggaggaaccaaactgactgtccta

SEQ ID NO: 421 - protein, 120 aa, Artificial Sequence [sequence omitted]

SEQ ID NO: 422 - DNA, 360 bp, Artificial Sequence
  VH of Her2/neu
gaggttcagctggtggagtctggcggtggcctggtgcagccagggggctcactccgtttgtcctgtgcagcttctggcttcaacattaaagacacctatatacactgggtgcgtcaggccccgggtaagggcctggaatgggttgcaaggatttatcctacgaatggttatactagatatgccgatagcgtcaagggccgtttcactataagcgcagacacatccaaaaacacagcctacctgcagatgaacagcctgcgtgctgaggacactgccgtctattattgttctaggtggggaggggacggcttctatgctatggactattggggtcaaggaaccctggtcactgtctcctcc

SEQ ID NO: 423 - protein, 107 aa, Artificial Sequence [sequence omitted]

SEQ ID NO: 424 - DNA, 321 bp, Artificial Sequence
  VL of Her2/neu
gatatccagatgacccagtccccgagctccctgtccgcctctgtgggcgatagggtcaccatcacctgccgtgccagtcaggatgtgaatactgctgtagcctggtatcaacagaaaccaggaaaagctccgaaactactgatttactcggcatccttcctctactctggagtcccttctcgcttctctggatccagatctgggacggatttcactctgaccatcagcagtctgcagccggaagacttcgcaacttattactgtcagcaacattatactactcctcccacgttcggacagggtaccaaggtggagatcaaa

SEQ ID NO: 425 - protein, 242 aa, Artificial Sequence
  VH-VL of Her2/neu
EVQLVESGGGLVQPGGSLRLSCAASGFNIKDTYIHWVRQAPGKGLEWVARIYPTNGYTRYADSVKGRFTISADTSKNTAYLQMNSLRAEDTAVYYCSRWGGDGFYAMDYWGQGTLVTVSSGGGGSGGGGSGGGGSDIQMTQSPSSLSASVGDRVTITCRASQDVNTAVAWYQQKPGKAPKLLIYSASFLYSGVPSRFSGSRSGTDFTLTISSLQPEDFATYYCQQHYTTPPTFGQGTKVEIK

SEQ ID NO: 426 - DNA, 726 bp, Artificial Sequence
  VH-VL of Her2/neu
gaggttcagctggtggagtctggcggtggcctggtgcagccagggggctcactccgtttgtcctgtgcagcttctggcttcaacattaaagacacctatatacactgggtgcgtcaggccccgggtaagggcctggaatgggttgcaaggatttatcctacgaatggttatactagatatgccgatagcgtcaagggccgtttcactataagcgcagacacatccaaaaacacagcctacctgcagatgaacagcctgcgtgctgaggacactgccgtctattattgttctaggtggggaggggacggcttctatgctatggactattggggtcaaggaaccctggtcactgtctcctccggtggtggtggttctggcggcggcggctccggtggtggtggttctgatatccagatgacccagtccccgagctccctgtccgcctctgtgggcgatagggtcaccatcacctgccgtgccagtcaggatgtgaatactgctgtagcctggtatcaacagaaaccaggaaaagctccgaaactactgatttactcggcatccttcctctactctggagtcccttctcgcttctctggatccagatctgggacggatttcactctgaccatcagcagtctgcagccggaagacttcgcaacttattactgtcagcaacattatactactcctcccacgttcggacagggtaccaaggtggagatcaaa

SEQ ID NO: 427 - protein, 242 aa, Artificial Sequence
  VL-VH of Her2/neu
DIQMTQSPSSLSASVGDRVTITCRASQDVNTAVAWYQQKPGKAPKLLIYSASFLYSGVPSRFSGSRSGTDFTLTISSLQPEDFATYYCQQHYTTPPTFGQGTKVEIKGGGGSGGGGSGGGGSEVQLVESGGGLVQPGGSLRLSCAASGFNIKDTYIHWVRQAPGKGLEWVARIYPTNGYTRYADSVKGRFTISADTSKNTAYLQMNSLRAEDTAVYYCSRWGGDGFYAMDYWGQGTLVTVSS

SEQ ID NO: 428 - DNA, 726 bp, Artificial Sequence
  VL-VH of Her2/neu
gatatccagatgacccagtccccgagctccctgtccgcctctgtgggcgatagggtcaccatcacctgccgtgccagtcaggatgtgaatactgctgtagcctggtatcaacagaaaccaggaaaagctccgaaactactgatttactcggcatccttcctctactctggagtcccttctcgcttctctggatccagatctgggacggatttcactctgaccatcagcagtctgcagccggaagacttcgcaacttattactgtcagcaacattatactactcctcccacgttcggacagggtaccaaggtggagatcaaaggtggtggtggttctggcggcggcggctccggtggtggtggttctgaggttcagctggtggagtctggcggtggcctggtgcagccagggggctcactccgtttgtcctgtgcagcttctggcttcaacattaaagacacctatatacactgggtgcgtcaggccccgggtaagggcctggaatgggttgcaaggatttatcctacgaatggttatactagatatgccgatagcgtcaagggccgtttcactataagcgcagacacatccaaaaacacagcctacctgcagatgaacagcctgcgtgctgaggacactgccgtctattattgttctaggtggggaggggacggcttctatgctatggactattggggtcaaggaaccctggtcactgtctcctcc

SEQ ID NO: 429 - protein, 496 aa, Artificial Sequence
  Her2/neu VH-VL x I2C VH VL
EVQLVESGGGLVQPGGSLRLSCAASGFNIKDTYIHWVRQAPGKGLEWVARIYPTNGYTRYADSVKGRFTISADTSKNTAYLQMNSLRAEDTAVYYCSRWGGDGFYAMDYWGQGTLVTVSSGGGGSGGGGSGGGGSDIQMTQSPSSLSASVGDRVTITCRASQDVNTAVAWYQQKPGKAPKLLIYSASFLYSGVPSRFSGSRSGTDFTLTISSLQPEDFATYYCQQHYTTPPTFGQGTKVEIKGGGGSEVQLVESGGGLVQPGGSLKLSCAASGFTFNKYAMNWVRQAPGKGLEWVARIRSKYNNYATYYADSVKDRFTISRDDSKNTAYLQMNNLKTEDTAVYYCVRHGNFGNSYISYWAYWGQGTLVTVSSGGGGSGGGGSGGGGSQTVVTQEPSLTVSPGGTVTLTCGSSTGAVTSGNYPNWVQQKPGQAPRGLIGGTKFLAPGTPARFSGSLLGGKAALTLSGVQPEDEAEYYCVLWYSNRWVFGGGTKLTVL

SEQ ID NO: 430 - DNA, 1488 bp, Artificial Sequence
  Her2/neu VH-VL x I2C VH VL
gaggttcagctggtggagtctggcggtggcctggtgcagccagggggctcactccgtttgtcctgtgcagcttctggcttcaacattaaagacacctatatacactgggtgcgtcaggccccgggtaagggcctggaatgggttgcaaggatttatcctacgaatggttatactagatatgccgatagcgtcaagggccgtttcactataagcgcagacacatccaaaaacacagcctacctgcagatgaacagcctgcgtgctgaggacactgccgtctattattgttctaggtggggaggggacggcttctatgctatggactattggggtcaaggaaccctggtcactgtctcctccggtggtggtggttctggcggcggcggctccggtggtggtggttctgatatccagatgacccagtccccgagctccctgtccgcctctgtgggcgatagggtcaccatcacctgccgtgccagtcaggatgtgaatactgctgtagcctggtatcaacagaaaccaggaaaagctccgaaactactgatttactcggcatccttcctctactctggagtcccttctcgcttctctggatccagatctgggacggatttcactctgaccatcagcagtctgcagccggaagacttcgcaacttattactgtcagcaacattatactactcctcccacgttcggacagggtaccaaggtggagatcaaaggaggtggtggatccgaggtgcagctggtcgagtctggaggaggattggtgcagcctggagggtcattgaaactctcatgtgcagcctctggattcaccttcaataagtacgccatgaactgggtccgccaggctccaggaaagggtttggaatgggttgctcgcataagaagtaaatataataattatgcaacatattatgccgattcagtgaaagacaggttcaccatctccagagatgattcaaaaaacactgcctatctacaaatgaacaacttgaagactgaggacactgccgtgtactactgtgtgagacatgggaacttcggtaatagctacatatcctactgggcttactggggccaagggactctggtcaccgtctcctcaggtggtggtggttctggcggcggcggctccggtggtggtggttctcagactgttgtgactcaggaaccttcactcaccgtatcacctggtggaacagtcacactcacttgtggctcctcgactggggctgttacatctggcaactacccaaactgggtccaacaaaaaccaggtcaggcaccccgtggtctaataggtgggactaagttcctcgcccccggtactcctgccagattctcaggctccctgcttggaggcaaggctgccctcaccctctcaggggtacagccagaggatgaggcagaatattactgtgttctatggtacagcaaccgctgggtgttcggtggaggaaccaaactgactgtccta

SEQ ID NO: 431 - protein, 496 aa, Artificial Sequence
  Her2/neu VL-VH x I2C VH VL
DIQMTQSPSSLSASVGDRVTITCRASQDVNTAVAWYQQKPGKAPKLLIYSASFLYSGVPSRFSGSRSGTDFTLTISSLQPEDFATYYCQQHYTTPPTFGQGTKVEIKGGGGSGGGGSGGGGSEVQLVESGGGLVQPGGSLRLSCAASGFNIKDTYIHWVRQAPGKGLEWVARIYPTNGYTRYADSVKGRFTISADTSKNTAYLQMNSLRAEDTAVYYCSRWGGDGFYAMDYWGQGTLVTVSSGGGGSEVQLVESGGGLVQPGGSLKLSCAASGFTFNKYAMNWVRQAPGKGLEWVARIRSKYNNYATYYADSVKDRFTISRDDSKNTAYLQMNNLKTEDTAVYYCVRHGNFGNSYISYWAYWGQGTLVTVSSGGGGSGGGGSGGGGSQTVVTQEPSLTVSPGGTVTLTCGSSTGAVTSGNYPNWVQQKPGQAPRGLIGGTKFLAPGTPARFSGSLLGGKAALTLSGVQPEDEAEYYCVLWYSNRWVFGGGTKLTVL

SEQ ID NO: 432 - DNA, 1488 bp, Artificial Sequence
  Her2/neu VL-VH x I2C VH VL
gatatccagatgacccagtccccgagctccctgtccgcctctgtgggcgatagggtcaccatcacctgccgtgccagtcaggatgtgaatactgctgtagcctggtatcaacagaaaccaggaaaagctccgaaactactgatttactcggcatccttcctctactctggagtcccttctcgcttctctggatccagatctgggacggatttcactctgaccatcagcagtctgcagccggaagacttcgcaacttattactgtcagcaacattatactactcctcccacgttcggacagggtaccaaggtggagatcaaaggtggtggtggttctggcggcggcggctccggtggtggtggttctgaggttcagctggtggagtctggcggtggcctggtgcagccagggggctcactccgtttgtcctgtgcagcttctggcttcaacattaaagacacctatatacactgggtgcgtcaggccccgggtaagggcctggaatgggttgcaaggatttatcctacgaatggttatactagatatgccgatagcgtcaagggccgtttcactataagcgcagacacatccaaaaacacagcctacctgcagatgaacagcctgcgtgctgaggacactgccgtctattattgttctaggtggggaggggacggcttctatgctatggactattggggtcaaggaaccctggtcactgtctcctccggaggtggtggatccgaggtgcagctggtcgagtctggaggaggattggtgcagcctggagggtcattgaaactctcatgtgcagcctctggattcaccttcaataagtacgccatgaactgggtccgccaggctccaggaaagggtttggaatgggttgctcgcataagaagtaaatataataattatgcaacatattatgccgattcagtgaaagacaggttcaccatctccagagatgattcaaaaaacactgcctatctacaaatgaacaacttgaagactgaggacactgccgtgtactactgtgtgagacatgggaacttcggtaatagctacatatcctactgggcttactggggccaagggactctggtcaccgtctcctcaggtggtggtggttctggcggcggcggctccggtggtggtggttctcagactgttgtgactcaggaaccttcactcaccgtatcacctggtggaacagtcacactcacttgtggctcctcgactggggctgttacatctggcaactacccaaactgggtccaacaaaaaccaggtcaggcaccccgtggtctaataggtgggactaagttcctcgcccccggtactcctgccagattctcaggctccctgcttggaggcaaggctgccctcaccctctcaggggtacagccagaggatgaggcagaatattactgtgttctatggtacagcaaccgctgggtgttcggtggaggaaccaaactgactgtccta

SEQ ID NO: 433 - protein, 496 aa, Artificial Sequence
  Her2/neu VH-VL x F12Q VH VL
EVQLVESGGGLVQPGGSLRLSCAASGFNIKDTYIHWVRQAPGKGLEWVARIYPTNGYTRYADSVKGRFTISADTSKNTAYLQMNSLRAEDTAVYYCSRWGGDGFYAMDYWGQGTLVTVSSGGGGSGGGGSGGGGSDIQMTQSPSSLSASVGDRVTITCRASQDVNTAVAWYQQKPGKAPKLLIYSASFLYSGVPSRFSGSRSGTDFTLTISSLQPEDFATYYCQQHYTTPPTFGQGTKVEIKGGGGSEVQLVESGGGLVQPGGSLKLSCAASGFTFNSYAMNWVRQAPGKGLEWVARIRSKYNNYATYYADSVKGRFTISRDDSKNTAYLQMNNLKTEDTAVYYCVRHGNFGNSYVSWWAYWGQGTLVTVSSGGGGSGGGGSGGGGSQTVVTQEPSLTVSPGGTVTLTCGSSTGAVTSGNYPNWVQQKPGQAPRGLIGGTKFLAPGTPARFSGSLLGGKAALTLSGVQPEDEAEYYCVLWYSNRWVFGGGTKLTVL

SEQ ID NO: 434 - DNA, 1488 bp, Artificial Sequence
  Her2/neu VH-VL x F12Q  VH VL
gaggttcagctggtggagtctggcggtggcctggtgcagccagggggctcactccgtttgtcctgtgcagcttctggcttcaacattaaagacacctatatacactgggtgcgtcaggccccgggtaagggcctggaatgggttgcaaggatttatcctacgaatggttatactagatatgccgatagcgtcaagggccgtttcactataagcgcagacacatccaaaaacacagcctacctgcagatgaacagcctgcgtgctgaggacactgccgtctattattgttctaggtggggaggggacggcttctatgctatggactattggggtcaaggaaccctggtcactgtctcctccggtggtggtggttctggcggcggcggctccggtggtggtggttctgatatccagatgacccagtccccgagctccctgtccgcctctgtgggcgatagggtcaccatcacctgccgtgccagtcaggatgtgaatactgctgtagcctggtatcaacagaaaccaggaaaagctccgaaactactgatttactcggcatccttcctctactctggagtcccttctcgcttctctggatccagatctgggacggatttcactctgaccatcagcagtctgcagccggaagacttcgcaacttattactgtcagcaacattatactactcctcccacgttcggacagggtaccaaggtggagatcaaaggaggtggtggatccgaggtgcagctggtcgagtctggaggaggattggtgcagcctggagggtcattgaaactctcatgtgcagcctctggattcaccttcaatagctacgccatgaactgggtccgccaggctccaggaaagggtttggaatgggttgctcgcataagaagtaaatataataattatgcaacatattatgccgattcagtgaaaggcaggttcaccatctccagagatgattcaaaaaacactgcctatctacaaatgaacaacttgaaaactgaggacactgccgtgtactactgtgtgagacatgggaacttcggtaatagctacgtttcctggtgggcttactggggccaagggactctggtcaccgtctcctcaggtggtggtggttctggcggcggcggctccggtggtggtggttctcagactgttgtgactcaggaaccttcactcaccgtatcacctggtggaacagtcacactcacttgtggctcctcgactggggctgttacatctggcaactacccaaactgggtccaacaaaaaccaggtcaggcaccccgtggtctaataggtgggactaagttcctcgcccccggtactcctgccagattctcaggctccctgcttggaggcaaggctgccctcaccctctcaggggtacagccagaggatgaggcagaatattactgtgttctatggtacagcaaccgctgggtgttcggtggaggaaccaaactgactgtccta

SEQ ID NO: 435 - protein, 496 aa, Artificial Sequence
  Her2/neu VL-VH x F12Q  VH VL
DIQMTQSPSSLSASVGDRVTITCRASQDVNTAVAWYQQKPGKAPKLLIYSASFLYSGVPSRFSGSRSGTDFTLTISSLQPEDFATYYCQQHYTTPPTFGQGTKVEIKGGGGSGGGGSGGGGSEVQLVESGGGLVQPGGSLRLSCAASGFNIKDTYIHWVRQAPGKGLEWVARIYPTNGYTRYADSVKGRFTISADTSKNTAYLQMNSLRAEDTAVYYCSRWGGDGFYAMDYWGQGTLVTVSSGGGGSEVQLVESGGGLVQPGGSLKLSCAASGFTFNSYAMNWVRQAPGKGLEWVARIRSKYNNYATYYADSVKGRFTISRDDSKNTAYLQMNNLKTEDTAVYYCVRHGNFGNSYVSWWAYWGQGTLVTVSSGGGGSGGGGSGGGGSQTVVTQEPSLTVSPGGTVTLTCGSSTGAVTSGNYPNWVQQKPGQAPRGLIGGTKFLAPGTPARFSGSLLGGKAALTLSGVQPEDEAEYYCVLWYSNRWVFGGGTKLTVL

SEQ ID NO: 436 - DNA, 1488 bp, Artificial Sequence
  Her2/neu VL-VH x F12Q  VH VL
gatatccagatgacccagtccccgagctccctgtccgcctctgtgggcgatagggtcaccatcacctgccgtgccagtcaggatgtgaatactgctgtagcctggtatcaacagaaaccaggaaaagctccgaaactactgatttactcggcatccttcctctactctggagtcccttctcgcttctctggatccagatctgggacggatttcactctgaccatcagcagtctgcagccggaagacttcgcaacttattactgtcagcaacattatactactcctcccacgttcggacagggtaccaaggtggagatcaaaggtggtggtggttctggcggcggcggctccggtggtggtggttctgaggttcagctggtggagtctggcggtggcctggtgcagccagggggctcactccgtttgtcctgtgcagcttctggcttcaacattaaagacacctatatacactgggtgcgtcaggccccgggtaagggcctggaatgggttgcaaggatttatcctacgaatggttatactagatatgccgatagcgtcaagggccgtttcactataagcgcagacacatccaaaaacacagcctacctgcagatgaacagcctgcgtgctgaggacactgccgtctattattgttctaggtggggaggggacggcttctatgctatggactattggggtcaaggaaccctggtcactgtctcctccggaggtggtggatccgaggtgcagctggtcgagtctggaggaggattggtgcagcctggagggtcattgaaactctcatgtgcagcctctggattcaccttcaatagctacgccatgaactgggtccgccaggctccaggaaagggtttggaatgggttgctcgcataagaagtaaatataataattatgcaacatattatgccgattcagtgaaaggcaggttcaccatctccagagatgattcaaaaaacactgcctatctacaaatgaacaacttgaaaactgaggacactgccgtgtactactgtgtgagacatgggaacttcggtaatagctacgtttcctggtgggcttactggggccaagggactctggtcaccgtctcctcaggtggtggtggttctggcggcggcggctccggtggtggtggttctcagactgttgtgactcaggaaccttcactcaccgtatcacctggtggaacagtcacactcacttgtggctcctcgactggggctgttacatctggcaactacccaaactgggtccaacaaaaaccaggtcaggcaccccgtggtctaataggtgggactaagttcctcgcccccggtactcctgccagattctcaggctccctgcttggaggcaaggctgccctcaccctctcaggggtacagccagaggatgaggcagaatattactgtgttctatggtacagcaaccgctgggtgttcggtggaggaaccaaactgactgtccta

SEQ ID NO: 437 - protein, 496 aa, Artificial Sequence
  Her2/neu VH-VL x H2C VH VL
EVQLVESGGGLVQPGGSLRLSCAASGFNIKDTYIHWVRQAPGKGLEWVARIYPTNGYTRYADSVKGRFTISADTSKNTAYLQMNSLRAEDTAVYYCSRWGGDGFYAMDYWGQGTLVTVSSGGGGSGGGGSGGGGSDIQMTQSPSSLSASVGDRVTITCRASQDVNTAVAWYQQKPGKAPKLLIYSASFLYSGVPSRFSGSRSGTDFTLTISSLQPEDFATYYCQQHYTTPPTFGQGTKVEIKGGGGSEVQLVESGGGLVQPGGSLKLSCAASGFTFNKYAMNWVRQAPGKGLEWVARIRSKYNNYATYYADSVKDRFTISRDDSKNTAYLQMNNLKTEDTAVYYCVRHGNFGNSYISYWAYWGQGTLVTVSSGGGGSGGGGSGGGGSQTVVTQEPSLTVSPGGTVTLTCGSSTGAVTSGYYPNWVQQKPGQAPRGLIGGTKFLAPGTPARFSGSLLGGKAALTLSGVQPEDEAEYYCALWYSNRWVFGGGTKLTVL

SEQ ID NO: 438 - DNA, 1488 bp, Artificial Sequence
  Her2/neu VH-VL x H2C  VH VL
gaggttcagctggtggagtctggcggtggcctggtgcagccagggggctcactccgtttgtcctgtgcagcttctggcttcaacattaaagacacctatatacactgggtgcgtcaggccccgggtaagggcctggaatgggttgcaaggatttatcctacgaatggttatactagatatgccgatagcgtcaagggccgtttcactataagcgcagacacatccaaaaacacagcctacctgcagatgaacagcctgcgtgctgaggacactgccgtctattattgttctaggtggggaggggacggcttctatgctatggactattggggtcaaggaaccctggtcactgtctcctccggtggtggtggttctggcggcggcggctccggtggtggtggttctgatatccagatgacccagtccccgagctccctgtccgcctctgtgggcgatagggtcaccatcacctgccgtgccagtcaggatgtgaatactgctgtagcctggtatcaacagaaaccaggaaaagctccgaaactactgatttactcggcatccttcctctactctggagtcccttctcgcttctctggatccagatctgggacggatttcactctgaccatcagcagtctgcagccggaagacttcgcaacttattactgtcagcaacattatactactcctcccacgttcggacagggtaccaaggtggagatcaaaggaggtggtggatccgaggtgcagctggtcgagtctggaggaggattggtgcagcctggagggtcattgaaactctcatgtgcagcctctggattcaccttcaataagtacgccatgaactgggtccgccaggctccaggaaagggtttggaatgggttgctcgcataagaagtaaatataataattatgcaacatattatgccgattcagtgaaagacaggttcaccatctccagagatgattcaaaaaacactgcctatctacaaatgaacaacttgaaaactgaggacactgccgtgtactactgtgtgagacatgggaacttcggtaatagctacatatcctactgggcttactggggccaagggactctggtcaccgtctcctcaggtggtggtggttctggcggcggcggctccggtggtggtggttctcagactgttgtgactcaggaaccttcactcaccgtatcacctggtggaacagtcacactcacttgtggctcctcgactggggctgttacatctggctactacccaaactgggtccaacaaaaaccaggtcaggcaccccgtggtctaataggtgggactaagttcctcgcccccggtactcctgccagattctcaggctccctgcttggaggcaaggctgccctcaccctctcaggggtacagccagaggatgaggcagaatattactgtgctctatggtacagcaaccgctgggtgttcggtggaggaaccaaactgactgtccta

SEQ ID NO: 439 - protein, 496 aa, Artificial Sequence
  Her2/neu VL-VH x H2C  VH VL
DIQMTQSPSSLSASVGDRVTITCRASQDVNTAVAWYQQKPGKAPKLLIYSASFLYSGVPSRFSGSRSGTDFTLTISSLQPEDFATYYCQQHYTTPPTFGQGTKVEIKGGGGSGGGGSGGGGSEVQLVESGGGLVQPGGSLRLSCAASGFNIKDTYIHWVRQAPGKGLEWVARIYPTNGYTRYADSVKGRFTISADTSKNTAYLQMNSLRAEDTAVYYCSRWGGDGFYAMDYWGQGTLVTVSSGGGGSEVQLVESGGGLVQPGGSLKLSCAASGFTFNKYAMNWVRQAPGKGLEWVARIRSKYNNYATYYADSVKDRFTISRDDSKNTAYLQMNNLKTEDTAVYYCVRHGNFGNSYISYWAYWGQGTLVTVSSGGGGSGGGGSGGGGSQTVVTQEPSLTVSPGGTVTLTCGSSTGAVTSGYYPNWVQQKPGQAPRGLIGGTKFLAPGTPARFSGSLLGGKAALTLSGVQPEDEAEYYCALWYSNRWVFGGGTKLTVL

SEQ ID NO: 440 - DNA, 1488 bp, Artificial Sequence
  Her2/neu VL-VH x H2C  VH VL
gatatccagatgacccagtccccgagctccctgtccgcctctgtgggcgatagggtcaccatcacctgccgtgccagtcaggatgtgaatactgctgtagcctggtatcaacagaaaccaggaaaagctccgaaactactgatttactcggcatccttcctctactctggagtcccttctcgcttctctggatccagatctgggacggatttcactctgaccatcagcagtctgcagccggaagacttcgcaacttattactgtcagcaacattatactactcctcccacgttcggacagggtaccaaggtggagatcaaaggtggtggtggttctggcggcggcggctccggtggtggtggttctgaggttcagctggtggagtctggcggtggcctggtgcagccagggggctcactccgtttgtcctgtgcagcttctggcttcaacattaaagacacctatatacactgggtgcgtcaggccccgggtaagggcctggaatgggttgcaaggatttatcctacgaatggttatactagatatgccgatagcgtcaagggccgtttcactataagcgcagacacatccaaaaacacagcctacctgcagatgaacagcctgcgtgctgaggacactgccgtctattattgttctaggtggggaggggacggcttctatgctatggactattggggtcaaggaaccctggtcactgtctcctccggaggtggtggatccgaggtgcagctggtcgagtctggaggaggattggtgcagcctggagggtcattgaaactctcatgtgcagcctctggattcaccttcaataagtacgccatgaactgggtccgccaggctccaggaaagggtttggaatgggttgctcgcataagaagtaaatataataattatgcaacatattatgccgattcagtgaaagacaggttcaccatctccagagatgattcaaaaaacactgcctatctacaaatgaacaacttgaaaactgaggacactgccgtgtactactgtgtgagacatgggaacttcggtaatagctacatatcctactgggcttactggggccaagggactctggtcaccgtctcctcaggtggtggtggttctggcggcggcggctccggtggtggtggttctcagactgttgtgactcaggaaccttcactcaccgtatcacctggtggaacagtcacactcacttgtggctcctcgactggggctgttacatctggctactacccaaactgggtccaacaaaaaccaggtcaggcaccccgtggtctaataggtgggactaagttcctcgcccccggtactcctgccagattctcaggctccctgcttggaggcaaggctgccctcaccctctcaggggtacagccagaggatgaggcagaatattactgtgctctatggtacagcaaccgctgggtgttcggtggaggaaccaaactgactgtccta

SEQ ID NO: 441 - protein, 7 aa, Artificial Sequence
  HCDR1 of EGFR
SGDYYWT

SEQ ID NO: 442 - protein, 16 aa, Artificial Sequence
  HCDR2 of EGFR
HIYYSGNTNYNPSLKS

SEQ ID NO: 443 - protein, 9 aa, Artificial Sequence
  HCDR3 of EGFR
DRVTGAFDI

SEQ ID NO: 444 - protein, 11 aa, Artificial Sequence
  LCDR1 of EGFR
QASQDISNYLN

SEQ ID NO: 445 - protein, 7 aa, Artificial Sequence
  LCDR2 of EGFR
DASNLET

SEQ ID NO: 446 - protein, 9 aa, Artificial Sequence
  LCDR3 of EGFR
QHFDHLPLA

SEQ ID NO: 447 - protein, 496 aa, Artificial Sequence
  EGFR HL x H2C HL
QVQLQESGPGLVKPSETLSLTCTVSGGSVSSGDYYWTWIRQSPGKGLEWIGHIYYSGNTNYNPSLKSRLTISIDTSKTQFSLKLSSVTAADTAIYYCVRDRVTGAFDIWGQGTMVTVSSGGGGSGGGGSGGGGSDIQMTQSPSSLSASVGDRVTITCQASQDISNYLNWYQQKPGKAPKLLIYDASNLETGVPSRFSGSGSGTDFTFTISSLQPEDIATYFCQHFDHLPLAFGGGTKVEIKSGGGGSEVQLVESGGGLVQPGGSLKLSCAASGFTFNKYAMNWVRQAPGKGLEWVARIRSKYNNYATYYADSVKDRFTISRDDSKNTAYLQMNNLKTEDTAVYYCVRHGNFGNSYISYWAYWGQGTLVTVSSGGGGSGGGGSGGGGSQTVVTQEPSLTVSPGGTVTLTCGSSTGAVTSGYYPNWVQQKPGQAPRGLIGGTKFLAPGTPARFSGSLLGGKAALTLSGVQPEDEAEYYCALWYSNRWVFGGGTKLTVL

SEQ ID NO: 448 - DNA, 1488 bp, Artificial Sequence
  EGFR HL x H2C HL
caggtgcagctgcaggagtcgggcccaggactggtgaagccttcggagaccctgtccctcacctgcactgtctctggtggctccgtcagcagtggtgattactactggacctggatccggcagtccccagggaagggactggagtggattggacacatctattacagtgggaacaccaattataacccctccctcaagagccgactcaccatatcaattgacacgtccaagactcagttctccctgaagctgagttctgtgaccgctgcggacacggccatttattactgtgtgcgagatcgagtgactggtgcttttgatatctggggccaagggacaatggtcaccgtctcttccggtggtggtggttctggcggcggcggctccggtggtggtggttctgacatccagatgacccagtctccatcctccctgtctgcatctgtcggagacagagtcaccatcacttgccaggcgagtcaggacatcagcaactatttaaattggtatcagcagaaaccagggaaagcccctaaactcctgatctacgatgcatccaatttggaaacaggggtcccatcaaggttcagtggaagtggatctgggacagattttactttcaccatcagcagcctgcagcctgaagatattgcaacatatttctgtcaacactttgatcatctcccgctcgctttcggcggagggaccaaggtggagatcaaatccggaggtggtggatccgaggtgcagctggtcgagtctggaggaggattggtgcagcctggagggtcattgaaactctcatgtgcagcctctggattcaccttcaataagtacgccatgaactgggtccgccaggctccaggaaagggtttggaatgggttgctcgcataagaagtaaatataataattatgcaacatattatgccgattcagtgaaagacaggttcaccatctccagagatgattcaaaaaacactgcctatctacaaatgaacaacttgaaaactgaggacactgccgtgtactactgtgtgagacatgggaacttcggtaatagctacatatcctactgggcttactggggccaagggactctggtcaccgtctcctcaggtggtggtggttctggcggcggcggctccggtggtggtggttctcagactgttgtgactcaggaaccttcactcaccgtatcacctggtggaacagtcacactcacttgtggctcctcgactggggctgttacatctggctactacccaaactgggtccaacaaaaaccaggtcaggcaccccgtggtctaataggtgggactaagttcctcgcccccggtactcctgccagattctcaggctccctgcttggaggcaaggctgccctcaccctctcaggggtacagccagaggatgaggcagaatattactgtgctctatggtacagcaaccgctgggtgttcggtggaggaaccaaactgactgtccta

SEQ ID NO: 449 - protein, 496 aa, Artificial Sequence
  EGFR HL x F12Q LH
QVQLQESGPGLVKPSETLSLTCTVSGGSVSSGDYYWTWIRQSPGKGLEWIGHIYYSGNTNYNPSLKSRLTISIDTSKTQFSLKLSSVTAADTAIYYCVRDRVTGAFDIWGQGTMVTVSSGGGGSGGGGSGGGGSDIQMTQSPSSLSASVGDRVTITCQASQDISNYLNWYQQKPGKAPKLLIYDASNLETGVPSRFSGSGSGTDFTFTISSLQPEDIATYFCQHFDHLPLAFGGGTKVEIKSGGGGSEVQLVESGGGLVQPGGSLKLSCAASGFTFNSYAMNWVRQAPGKGLEWVARIRSKYNNYATYYADSVKGRFTISRDDSKNTAYLQMNNLKTEDTAVYYCVRHGNFGNSYVSWWAYWGQGTLVTVSSGGGGSGGGGSGGGGSQTVVTQEPSLTVSPGGTVTLTCGSSTGAVTSGNYPNWVQQKPGQAPRGLIGGTKFLAPGTPARFSGSLLGGKAALTLSGVQPEDEAEYYCVLWYSNRWVFGGGTKLTVL

SEQ ID NO: 450 - DNA, 1488 bp, Artificial Sequence
  EGFR HL x F12Q LH
caggtgcagctgcaggagtcgggcccaggactggtgaagccttcggagaccctgtccctcacctgcactgtctctggtggctccgtcagcagtggtgattactactggacctggatccggcagtccccagggaagggactggagtggattggacacatctattacagtgggaacaccaattataacccctccctcaagagccgactcaccatatcaattgacacgtccaagactcagttctccctgaagctgagttctgtgaccgctgcggacacggccatttattactgtgtgcgagatcgagtgactggtgcttttgatatctggggccaagggacaatggtcaccgtctcttccggtggtggtggttctggcggcggcggctccggtggtggtggttctgacatccagatgacccagtctccatcctccctgtctgcatctgtcggagacagagtcaccatcacttgccaggcgagtcaggacatcagcaactatttaaattggtatcagcagaaaccagggaaagcccctaaactcctgatctacgatgcatccaatttggaaacaggggtcccatcaaggttcagtggaagtggatctgggacagattttactttcaccatcagcagcctgcagcctgaagatattgcaacatatttctgtcaacactttgatcatctcccgctcgctttcggcggagggaccaaggtggagatcaaatccggaggtggtggatccgaggtgcagctggtcgagtctggaggaggattggtgcagcctggagggtcattgaaactctcatgtgcagcctctggattcaccttcaatagctacgccatgaactgggtccgccaggctccaggaaagggtttggaatgggttgctcgcataagaagtaaatataataattatgcaacatattatgccgattcagtgaaaggcaggttcaccatctccagagatgattcaaaaaacactgcctatctacaaatgaacaacttgaaaactgaggacactgccgtgtactactgtgtgagacatgggaacttcggtaatagctacgtttcctggtgggcttactggggccaagggactctggtcaccgtctcctcaggtggtggtggttctggcggcggcggctccggtggtggtggttctcagactgttgtgactcaggaaccttcactcaccgtatcacctggtggaacagtcacactcacttgtggctcctcgactggggctgttacatctggcaactacccaaactgggtccaacaaaaaccaggtcaggcaccccgtggtctaataggtgggactaagttcctcgcccccggtactcctgccagattctcaggctccctgcttggaggcaaggctgccctcaccctctcaggggtacagccagaggatgaggcagaatattactgtgttctatggtacagcaaccgctgggtgttcggtggaggaaccaaactgactgtccta

SEQ ID NO: 451 - protein, 496 aa, Artificial Sequence
  EGFR HL x I2C HL
QVQLQESGPGLVKPSETLSLTCTVSGGSVSSGDYYWTWIRQSPGKGLEWIGHIYYSGNTNYNPSLKSRLTISIDTSKTQFSLKLSSVTAADTAIYYCVRDRVTGAFDIWGQGTMVTVSSGGGGSGGGGSGGGGSDIQMTQSPSSLSASVGDRVTITCQASQDISNYLNWYQQKPGKAPKLLIYDASNLETGVPSRFSGSGSGTDFTFTISSLQPEDIATYFCQHFDHLPLAFGGGTKVEIKSGGGGSEVQLVESGGGLVQPGGSLKLSCAASGFTFNKYAMNWVRQAPGKGLEWVARIRSKYNNYATYYADSVKDRFTISRDDSKNTAYLQMNNLKTEDTAVYYCVRHGNFGNSYISYWAYWGQGTLVTVSSGGGGSGGGGSGGGGSQTVVTQEPSLTVSPGGTVTLTCGSSTGAVTSGNYPNWVQQKPGQAPRGLIGGTKFLAPGTPARFSGSLLGGKAALTLSGVQPEDEAEYYCVLWYSNRWVFGGGTKLTVL

SEQ ID NO: 452 - DNA, 1488 bp, Artificial Sequence
  EGFR HL x I2C HL
caggtgcagctgcaggagtcgggcccaggactggtgaagccttcggagaccctgtccctcacctgcactgtctctggtggctccgtcagcagtggtgattactactggacctggatccggcagtccccagggaagggactggagtggattggacacatctattacagtgggaacaccaattataacccctccctcaagagccgactcaccatatcaattgacacgtccaagactcagttctccctgaagctgagttctgtgaccgctgcggacacggccatttattactgtgtgcgagatcgagtgactggtgcttttgatatctggggccaagggacaatggtcaccgtctcttccggtggtggtggttctggcggcggcggctccggtggtggtggttctgacatccagatgacccagtctccatcctccctgtctgcatctgtcggagacagagtcaccatcacttgccaggcgagtcaggacatcagcaactatttaaattggtatcagcagaaaccagggaaagcccctaaactcctgatctacgatgcatccaatttggaaacaggggtcccatcaaggttcagtggaagtggatctgggacagattttactttcaccatcagcagcctgcagcctgaagatattgcaacatatttctgtcaacactttgatcatctcccgctcgctttcggcggagggaccaaggtggagatcaaatccggaggtggtggatccgaggtgcagctggtcgagtctggaggaggattggtgcagcctggagggtcattgaaactctcatgtgcagcctctggattcaccttcaataagtacgccatgaactgggtccgccaggctccaggaaagggtttggaatgggttgctcgcataagaagtaaatataataattatgcaacatattatgccgattcagtgaaagacaggttcaccatctccagagatgattcaaaaaacactgcctatctacaaatgaacaacttgaaaactgaggacactgccgtgtactactgtgtgagacatgggaacttcggtaatagctacatatcctactgggcttactggggccaagggactctggtcaccgtctcctcaggtggtggtggttctggcggcggcggctccggtggtggtggttctcagactgttgtgactcaggaaccttcactcaccgtatcacctggtggaacagtcacactcacttgtggctcctcgactggggctgttacatctggcaactacccaaactgggtccaacaaaaaccaggtcaggcaccccgtggtctaataggtgggactaagttcctcgcccccggtactcctgccagattctcaggctccctgcttggaggcaaggctgccctcaccctctcaggggtacagccagaggatgaggcagaatattactgtgttctatggtacagcaaccgctgggtgttcggtggaggaaccaaactgactgtccta

SEQ ID NO: 453 - protein, 5 aa, Artificial Sequence
  HCDR1 of EGFR
NYGVH

SEQ ID NO: 454 - protein, 16 aa, Artificial Sequence
  HCDR2 of EGFR
VIWSGGNTDYNTPFTS

SEQ ID NO: 455 - protein, 11 aa, Artificial Sequence
  HCDR3 of EGFR
ALTYYDYEFAY

SEQ ID NO: 456 - protein, 11 aa, Artificial Sequence
  LCDR1 of EGFR
RASQSIGTNIH

SEQ ID NO: 457 - protein, 7 aa, Artificial Sequence
  LCDR2 of EGFR
YASESIS

SEQ ID NO: 458 - protein, 9 aa, Artificial Sequence
  LCDR3 of EGFR
QQNNNWPTT

SEQ ID NO: 459 - DNA, 3768 bp, Homo sapiens
atggagctggcggccttgtgccgctgggggctcctcctcgccctcttgccccccggagccgcgagcacccaagtgtgcaccggcacagacatgaagctgcggctccctgccagtcccgagacccacctggacatgctccgccacctctaccagggctgccaggtggtgcagggaaacctggaactcacctacctgcccaccaatgccagcctgtccttcctgcaggatatccaggaggtgcagggctacgtgctcatcgctcacaaccaagtgaggcaggtcccactgcagaggctgcggattgtgcgaggcacccagctctttgaggacaactatgccctggccgtgctagacaatggagacccgctgaacaataccacccctgtcacaggggcctccccaggaggcctgcgggagctgcagcttcgaagcctcacagagatcttgaaaggaggggtcttgatccagcggaacccccagctctgctaccaggacacgattttgtggaaggacatcttccacaagaacaaccagctggctctcacactgatagacaccaaccgctctcgggcctgccacccctgttctccgatgtgtaagggctcccgctgctggggagagagttctgaggattgtcagagcctgacgcgcactgtctgtgccggtggctgtgcccgctgcaaggggccactgcccactgactgctgccatgagcagtgtgctgccggctgcacgggccccaagcactctgactgcctggcctgcctccacttcaaccacagtggcatctgtgagctgcactgcccagccctggtcacctacaacacagacacgtttgagtccatgcccaatcccgagggccggtatacattcggcgccagctgtgtgactgcctgtccctacaactacctttctacggacgtgggatcctgcaccctcgtctgccccctgcacaaccaagaggtgacagcagaggatggaacacagcggtgtgagaagtgcagcaagccctgtgcccgagtgtgctatggtctgggcatggagcacttgcgagaggtgagggcagttaccagtgccaatatccaggagtttgctggctgcaagaagatctttgggagcctggcatttctgccggaaagctttgatggggacccagcctccaacactgccccgctccagccagagcagctccaagtgtttgagactctggaagagatcacaggttacctatacatctcagcatggccggacagcctgcctgacctcagcgtcttccagaacctgcaagtaatccggggacgaattctgcacaatggcgcctactcgctgaccctgcaagggctgggcatcagctggctggggctgcgctcactgagggaactgggcagtggactggccctcatccaccataacacccacctctgcttcgtgcacacggtgccctgggaccagctctttcggaacccgcaccaagctctgctccacactgccaaccggccagaggacgagtgtgtgggcgagggcctggcctgccaccagctgtgcgcccgagggcactgctggggtccagggcccacccagtgtgtcaactgcagccagttccttcggggccaggagtgcgtggaggaatgccgagtactgcaggggctccccagggagtatgtgaatgccaggcactgtttgccgtgccaccctgagtgtcagccccagaatggctcagtgacctgttttggaccggaggctgaccagtgtgtggcctgtgcccactataaggaccctcccttctgcgtggcccgctgccccagcggtgtgaaacctgacctctcctacatgcccatctggaagtttccagatgaggagggcgcatgccagccttgccccatcaactgcacccactcctgtgtggacctggatgacaagggctgccccgccgagcagagagccagccctctgacgtccatcatctctgcggtggttggcattctgctggtcgtggtcttgggggtggtctttgggatcctcatcaagcgacggcagcagaagatccggaagtacacgatgcggagactgctgcaggaaacggagctggtggagccgctgacacctagcggagcgatgcccaaccaggcgcagatgcggatcctgaaagagacggagctgaggaaggtgaaggtgcttggatctggcgcttttggcacagtctacaagggcatctggatccctgatggggagaatgtgaaaattccagtggccatcaaagtgttgagggaaaacacatcccccaaagccaacaaagaaatcttagacgaagcatacgtgatggctggtgtgggctccccatatgtctcccgccttctgggcatctgcctgacatccacggtgcagctggtgacacagcttatgccctatggctgcctcttagaccatgtccgggaaaaccgcggacgcctgggctcccaggacctgctgaactggtgtatgcagattgccaaggggatgagctacctggaggatgtgcggctcgtacacagggacttggccgctcggaacgtgctggtcaagagtcccaaccatgtcaaaattacagacttcgggctggctcggctgctggacattgacgagacagagtaccatgcagatgggggcaaggtgcccatcaagtggatggcgctggagtccattctccgccggcggttcacccaccagagtgatgtgtggagttatggtgtgactgtgtgggagctgatgacttttggggccaaaccttacgatgggatcccagcccgggagatccctgacctgctggaaaagggggagcggctgccccagccccccatctgcaccattgatgtctacatgatcatggtcaaatgttggatgattgactctgaatgtcggccaagattccgggagttggtgtctgaattctcccgcatggccagggacccccagcgctttgtggtcatccagaatgaggacttgggcccagccagtcccttggacagcaccttctaccgctcactgctggaggacgatgacatgggggacctggtggatgctgaggagtatctggtaccccagcagggcttcttctgtccagaccctgccccgggcgctgggggcatggtccaccacaggcaccgcagctcatctaccaggagtggcggtggggacctgacactagggctggagccctctgaagaggaggcccccaggtctccactggcaccctccgaaggggctggctccgatgtatttgatggtgacctgggaatgggggcagccaaggggctgcaaagcctccccacacatgaccccagccctctacagcggtacagtgaggaccccacagtacccctgccctctgagactgatggctacgttgcccccctgacctgcagcccccagcctgaatatgtgaaccagccagatgttcggccccagcccccttcgccccgagagggccctctgcctgctgcccgacctgctggtgccactctggaaaggcccaagactctctccccagggaagaatggggtcgtcaaagacgtttttgcctttgggggtgccgtggagaaccccgagtacttgacaccccagggaggagctgcccctcagccccaccctcctcctgccttcagcccagccttcgacaacctctattactgggaccaggacccaccagagcggggggctccacccagcaccttcaaagggacacctacggcagagaacccagagtacctgggtctggacgtgccagtgtga

SEQ ID NO: 460 - protein, 1255 aa, Homo sapiens [sequence omitted]

SEQ ID NO: 461 - DNA, 3768 bp, Artificial Sequence
  chimeric human/macaque HER2 protein
atggagctggcggccttgtgccgctgggggctcctcctcgccctcttgccccccggagccgcgagcacccaagtgtgcaccggcacagacatgaagctgcggctccctgccagtcccgagacccacctggacatgctccgccacctctaccagggctgccaggtggtgcagggaaacctggaactcacctacctgcccaccaatgccagcctgtccttcctgcaggatatccaggaggtgcagggctacgtgctcatcgctcacaaccaagtgaggcaggtcccactgcagaggctgcggattgtgcgaggcacccagctctttgaggacaactatgccctggccgtgctagacaatggagacccgctgaacaataccacccctgtcacaggggcctccccaggaggcctgcgggagctgcagcttcgaagcctcacagagatcttgaaaggaggggtcttgatccagcggaacccccagctctgctaccaggacacgattttgtggaaggacatcttccacaagaacaaccagctggctctcacactgatagacaccaaccgctctcgggcctgccacccctgttctccagtgtgtaagggctcccgctgctggggagagagttctgaggattgtcagagcctgacgcgcactgtctgtgccggtggctgtgcccgctgcaaggggccactgcccactgactgctgccatgagcagtgtgctgccggctgcacgggccccaagcactctgactgcctggcctgcctccacttcaaccacagtggcatctgtgagctgcactgcccagccctggtcacctacaacacagacacgtttgagtccatgcccaatcccgagggccggtatacattcggcgccagctgtgtgactgcctgtccctacaactacctttctacggacgtgggatcctgcaccctcgtctgccccctgcacaaccaagaggtgacagcagaggatggaacacagcggtgtgagaagtgcagcaagccctgtgcccgagtgtgctatggtctgggcatggagcacttgcgagaggtgagggcagttaccagtgccaatatccaggagtttgctggctgcaagaagatctttgggagcctggcatttctgccggaaagctttgatggggacccagcctccaacactgccccgcttcagccggagcagctccgagtgtttgagactctggaagagatcacaggttacctatacatctcagcatggccagacagcctgcctgaccttagcgtcctccagaacctgcaagtaatccggggacgaattctgcacaatggcgcctactcgctgaccctgcaagggctgggcatcagctggctggggctgcgctcactgagggaactgggcagtggactggccctcatccaccataacacccgcctctgctttgtgcacacggtgccctgggaccagctctttcggaacccgcaccaagctctgctccacactgccaaccggccagaggacgagtgtgtgggcgagggcctggcctgccaccagctgtgcgcccgagggcactgctggggtccagggcccacccagtgtgtcaactgcagccagttccttcggggccaggagtgcgtggaggaatgccgagtactgcaggggctccccagggagtatgtgaatgccaggcactgtttgccgtgccaccctgagtgtcagccccagaatggctcagtgacctgttttggaccggaggctgaccagtgtgtggcctgtgcccactataaggaccctcccttctgcgtggcccgctgccccagcggtgtgaaacctgacctctcctacatgcccatctggaagtttccagatgaggagggcacgtgccagtcttgccccatcaactgcacccactcctgtgtggacctggatgacaagggctgccccgccgagcagagagccagccctctgactagtatcatctctgcggtggttggcattctgctggtcgtggtcttgggggtggtctttgggatcctcatcaagcgacggcagcagaagatccggaagtacacgatgcggagactgctgcaggaaacggagctggtggagccgctgacacctagcggagcgatgcccaaccaggcgcagatgcggatcctgaaagagacggagctgaggaaggtgaaggtgcttggatctggcgcttttggcacagtctacaagggcatctggatccctgatggggagaatgtgaaaattccagtggccatcaaagtgttgagggaaaacacatcccccaaagccaacaaagaaatcttagacgaagcatacgtgatggctggtgtgggctccccatatgtctcccgccttctgggcatctgcctgacatccacggtgcagctggtgacacagcttatgccctatggctgcctcttagaccatgtccgggaaaaccgcggacgcctgggctcccaggacctgctgaactggtgtatgcagattgccaaggggatgagctacctggaggatgtgcggctcgtacacagggacttggccgctcggaacgtgctggtcaagagtcccaaccatgtcaaaattacagacttcgggctggctcggctgctggacattgacgagacagagtaccatgcagatgggggcaaggtgcccatcaagtggatggcgctggagtccattctccgccggcggttcacccaccagagtgatgtgtggagttatggtgtgactgtgtgggagctgatgacttttggggccaaaccttacgatgggatcccagcccgggagatccctgacctgctggaaaagggggagcggctgccccagccccccatctgcaccattgatgtctacatgatcatggtcaaatgttggatgattgactctgaatgtcggccaagattccgggagttggtgtctgaattctcccgcatggccagggacccccagcgctttgtggtcatccagaatgaggacttgggcccagccagtcccttggacagcaccttctaccgctcactgctggaggacgatgacatgggggacctggtggatgctgaggagtatctggtaccccagcagggcttcttctgtccagaccctgccccgggcgctgggggcatggtccaccacaggcaccgcagctcatctaccaggagtggcggtggggacctgacactagggctggagccctctgaagaggaggcccccaggtctccactggcaccctccgaaggggctggctccgatgtatttgatggtgacctgggaatgggggcagccaaggggctgcaaagcctccccacacatgaccccagccctctacagcggtacagtgaggaccccacagtacccctgccctctgagactgatggctacgttgcccccctgacctgcagcccccagcctgaatatgtgaaccagccagatgttcggccccagcccccttcgccccgagagggccctctgcctgctgcccgacctgctggtgccactctggaaaggcccaagactctctccccagggaagaatggggtcgtcaaagacgtttttgcctttgggggtgccgtggagaaccccgagtacttgacaccccagggaggagctgcccctcagccccaccctcctcctgccttcagcccagccttcgacaacctctattactgggaccaggacccaccagagcggggggctccacccagcaccttcaaagggacacctacggcagagaacccagagtacctgggtctggacgtgccagtgtga

SEQ ID NO: 462 - protein, 1255 aa, Artificial Sequence
  chimeric human/macaque HER2 protein
MELAALCRWGLLLALLPPGAASTQVCTGTDMKLRLPASPETHLDMLRHLYQGCQVVQGNLELTYLPTNASLSFLQDIQEVQGYVLIAHNQVRQVPLQRLRIVRGTQLFEDNYALAVLDNGDPLNNTTPVTGASPGGLRELQLRSLTEILKGGVLIQRNPQLCYQDTILWKDIFHKNNQLALTLIDTNRSRACHPCSPVCKGSRCWGESSEDCQSLTRTVCAGGCARCKGPLPTDCCHEQCAAGCTGPKHSDCLACLHFNHSGICELHCPALVTYNTDTFESMPNPEGRYTFGASCVTACPYNYLSTDVGSCTLVCPLHNQEVTAEDGTQRCEKCSKPCARVCYGLGMEHLREVRAVTSANIQEFAGCKKIFGSLAFLPESFDGDPASNTAPLQPEQLRVFETLEEITGYLYISAWPDSLPDLSVLQNLQVIRGRILHNGAYSLTLQGLGISWLGLRSLRELGSGLALIHHNTRLCFVHTVPWDQLFRNPHQALLHTANRPEDECVGEGLACHQLCARGHCWGPGPTQCVNCSQFLRGQECVEECRVLQGLPREYVNARHCLPCHPECQPQNGSVTCFGPEADQCVACAHYKDPPFCVARCPSGVKPDLSYMPIWKFPDEEGTCQSCPINCTHSCVDLDDKGCPAEQRASPLTSIISAVVGILLVVVLGVVFGILIKRRQQKIRKYTMRRLLQETELVEPLTPSGAMPNQAQMRILKETELRKVKVLGSGAFGTVYKGIWIPDGENVKIPVAIKVLRENTSPKANKEILDEAYVMAGVGSPYVSRLLGICLTSTVQLVTQLMPYGCLLDHVRENRGRLGSQDLLNWCMQIAKGMSYLEDVRLVHRDLAARNVLVKSPNHVKITDFGLARLLDIDETEYHADGGKVPIKWMALESILRRRFTHQSDVWSYGVTVWELMTFGAKPYDGIPAREIPDLLEKGERLPQPPICTIDVYMIMVKCWMIDSECRPRFRELVSEFSRMARDPQRFVVIQNEDLGPASPLDSTFYRSLLEDDDMGDLVDAEEYLVPQQGFFCPDPAPGAGGMVHHRHRSSSTRSGGGDLTLGLEPSEEEAPRSPLAPSEGAGSDVFDGDLGMGAAKGLQSLPTHDPSPLQRYSEDPTVPLPSETDGYVAPLTCSPQPEYVNQPDVRPQPPSPREGPLPAARPAGATLERPKTLSPGKNGVVKDVFAFGGAVENPEYLTPQGGAAPQPHPPPAFSPAFDNLYYWDQDPPERGAPPSTFKGTPTAENPEYLGLDVPV

SEQ ID NO: 463 - protein, 5 aa, Artificial Sequence
  HCDR1 of Her2/neu
DTYIH

SEQ ID NO: 464 - protein, 17 aa, Artificial Sequence
  HCDR2 of Her2/neu
RIYPTNGYTRYADSVKG

SEQ ID NO: 465 - protein, 11 aa, Artificial Sequence
  HCDR3 of Her2/neu
WGGDGFYAMDY

SEQ ID NO: 466 - protein, 11 aa, Artificial Sequence
  LCDR1 of Her2/neu
RASQDVNTAVA

SEQ ID NO: 467 - protein, 7 aa, Artificial Sequence
  LCDR2 of Her2/neu
SASFLYS

SEQ ID NO: 468 - protein, 9 aa, Artificial Sequence
  LCDR3 of Her2/neu
QQHYTTPPT

SEQ ID NO: 469 - protein, 497 aa, Artificial Sequence
  Her2/neu HL x H2C HL
EVQLVESGGGLVQPGGSLRLSCAASGFNIKDTYIHWVRQAPGKGLEWVARIYPTNGYTRYADSVKGRFTISADTSKNTAYLQMNSLRAEDTAVYYCSRWGGDGFYAMDYWGQGTLVTVSSGGGGSGGGGSGGGGSDIQMTQSPSSLSASVGDRVTITCRASQDVNTAVAWYQQKPGKAPKLLIYSASFLYSGVPSRFSGSRSGTDFTLTISSLQPEDFATYYCQQHYTTPPTFGQGTKVEIKSGGGGSEVQLVESGGGLVQPGGSLKLSCAASGFTFNKYAMNWVRQAPGKGLEWVARIRSKYNNYATYYADSVKDRFTISRDDSKNTAYLQMNNLKTEDTAVYYCVRHGNFGNSYISYWAYWGQGTLVTVSSGGGGSGGGGSGGGGSQTVVTQEPSLTVSPGGTVTLTCGSSTGAVTSGYYPNWVQQKPGQAPRGLIGGTKFLAPGTPARFSGSLLGGKAALTLSGVQPEDEAEYYCALWYSNRWVFGGGTKLTVL

SEQ ID NO: 470 - DNA, 1491 bp, Artificial Sequence
  Her2/neu HL x H2C HL
gaggttcagctggtggagtctggcggtggcctggtgcagccagggggctcactccgtttgtcctgtgcagcttctggcttcaacattaaagacacctatatacactgggtgcgtcaggccccgggtaagggcctggaatgggttgcaaggatttatcctacgaatggttatactagatatgccgatagcgtcaagggccgtttcactataagcgcagacacatccaaaaacacagcctacctgcagatgaacagcctgcgtgctgaggacactgccgtctattattgttctaggtggggaggggacggcttctatgctatggactattggggtcaaggaaccctggtcactgtctcctccggtggtggtggttctggcggcggcggctccggtggtggtggttctgacatccagatgacccagtcccctagctccctgtccgcctctgtgggcgatagggtcaccatcacctgccgtgccagtcaggatgtgaatactgctgtagcctggtatcaacagaaaccaggaaaagctccgaaactactgatttactcggcatccttcctctactctggagtcccttctcgcttctctggatccagatctgggacggatttcactctgaccatcagcagtctgcagccggaagacttcgcaacttattactgtcagcaacattatactactcctcccacgttcggacagggtaccaaggtggagatcaaatccggaggtggtggatccgaggtgcagctggtcgagtctggaggaggattggtgcagcctggagggtcattgaaactctcatgtgcagcctctggattcaccttcaataagtacgccatgaactgggtccgccaggctccaggaaagggtttggaatgggttgctcgcataagaagtaaatataataattatgcaacatattatgccgattcagtgaaagacaggttcaccatctccagagatgattcaaaaaacactgcctatctacaaatgaacaacttgaaaactgaggacactgccgtgtactactgtgtgagacatgggaacttcggtaatagctacatatcctactgggcttactggggccaagggactctggtcaccgtctcctcaggtggtggtggttctggcggcggcggctccggtggtggtggttctcagactgttgtgactcaggaaccttcactcaccgtatcacctggtggaacagtcacactcacttgtggctcctcgactggggctgttacatctggctactacccaaactgggtccaacaaaaaccaggtcaggcaccccgtggtctaataggtgggactaagttcctcgcccccggtactcctgccagattctcaggctccctgcttggaggcaaggctgccctcaccctctcaggggtacagccagaggatgaggcagaatattactgtgctctatggtacagcaaccgctgggtgttcggtggaggaaccaaactgactgtccta

SEQ ID NO: 471 - protein, 497 aa, Artificial Sequence
  Her2/neu HL x F12Q HL
EVQLVESGGGLVQPGGSLRLSCAASGFNIKDTYIHWVRQAPGKGLEWVARIYPTNGYTRYADSVKGRFTISADTSKNTAYLQMNSLRAEDTAVYYCSRWGGDGFYAMDYWGQGTLVTVSSGGGGSGGGGSGGGGSDIQMTQSPSSLSASVGDRVTITCRASQDVNTAVAWYQQKPGKAPKLLIYSASFLYSGVPSRFSGSRSGTDFTLTISSLQPEDFATYYCQQHYTTPPTFGQGTKVEIKSGGGGSEVQLVESGGGLVQPGGSLKLSCAASGFTFNSYAMNWVRQAPGKGLEWVARIRSKYNNYATYYADSVKGRFTISRDDSKNTAYLQMNNLKTEDTAVYYCVRHGNFGNSYVSWWAYWGQGTLVTVSSGGGGSGGGGSGGGGSQTVVTQEPSLTVSPGGTVTLTCGSSTGAVTSGNYPNWVQQKPGQAPRGLIGGTKFLAPGTPARFSGSLLGGKAALTLSGVQPEDEAEYYCVLWYSNRWVFGGGTKLTVL

SEQ ID NO: 472 - DNA, 1491 bp, Artificial Sequence
  Her2/neu HL x F12Q HL
gaggttcagctggtggagtctggcggtggcctggtgcagccagggggctcactccgtttgtcctgtgcagcttctggcttcaacattaaagacacctatatacactgggtgcgtcaggccccgggtaagggcctggaatgggttgcaaggatttatcctacgaatggttatactagatatgccgatagcgtcaagggccgtttcactataagcgcagacacatccaaaaacacagcctacctgcagatgaacagcctgcgtgctgaggacactgccgtctattattgttctaggtggggaggggacggcttctatgctatggactattggggtcaaggaaccctggtcactgtctcctccggtggtggtggttctggcggcggcggctccggtggtggtggttctgacatccagatgacccagtcccctagctccctgtccgcctctgtgggcgatagggtcaccatcacctgccgtgccagtcaggatgtgaatactgctgtagcctggtatcaacagaaaccaggaaaagctccgaaactactgatttactcggcatccttcctctactctggagtcccttctcgcttctctggatccagatctgggacggatttcactctgaccatcagcagtctgcagccggaagacttcgcaacttattactgtcagcaacattatactactcctcccacgttcggacagggtaccaaggtggagatcaaatccggaggtggtggatccgaggtgcagctggtcgagtctggaggaggattggtgcagcctggagggtcattgaaactctcatgtgcagcctctggattcaccttcaatagctacgccatgaactgggtccgccaggctccaggaaagggtttggaatgggttgctcgcataagaagtaaatataataattatgcaacatattatgccgattcagtgaaaggcaggttcaccatctccagagatgattcaaaaaacactgcctatctacaaatgaacaacttgaaaactgaggacactgccgtgtactactgtgtgagacatgggaacttcggtaatagctacgtttcctggtgggcttactggggccaagggactctggtcaccgtctcctcaggtggtggtggttctggcggcggcggctccggtggtggtggttctcagactgttgtgactcaggaaccttcactcaccgtatcacctggtggaacagtcacactcacttgtggctcctcgactggggctgttacatctggcaactacccaaactgggtccaacaaaaaccaggtcaggcaccccgtggtctaataggtgggactaagttcctcgcccccggtactcctgccagattctcaggctccctgcttggaggcaaggctgccctcaccctctcaggggtacagccagaggatgaggcagaatattactgtgttctatggtacagcaaccgctgggtgttcggtggaggaaccaaactgactgtccta

SEQ ID NO: 473 - protein, 497 aa, Artificial Sequence
  Her2/neu HL x I2C HL
EVQLVESGGGLVQPGGSLRLSCAASGFNIKDTYIHWVRQAPGKGLEWVARIYPTNGYTRYADSVKGRFTISADTSKNTAYLQMNSLRAEDTAVYYCSRWGGDGFYAMDYWGQGTLVTVSSGGGGSGGGGSGGGGSDIQMTQSPSSLSASVGDRVTITCRASQDVNTAVAWYQQKPGKAPKLLIYSASFLYSGVPSRFSGSRSGTDFTLTISSLQPEDFATYYCQQHYTTPPTFGQGTKVEIKSGGGGSEVQLVESGGGLVQPGGSLKLSCAASGFTFNKYAMNWVRQAPGKGLEWVARIRSKYNNYATYYADSVKDRFTISRDDSKNTAYLQMNNLKTEDTAVYYCVRHGNFGNSYISYWAYWGQGTLVTVSSGGGGSGGGGSGGGGSQTVVTQEPSLTVSPGGTVTLTCGSSTGAVTSGNYPNWVQQKPGQAPRGLIGGTKFLAPGTPARFSGSLLGGKAALTLSGVQPEDEAEYYCVLWYSNRWVFGGGTKLTVL

SEQ ID NO: 474 - DNA, 1491 bp, Artificial Sequence
  Her2/neu HL x I2C HL
gaggttcagctggtggagtctggcggtggcctggtgcagccagggggctcactccgtttgtcctgtgcagcttctggcttcaacattaaagacacctatatacactgggtgcgtcaggccccgggtaagggcctggaatgggttgcaaggatttatcctacgaatggttatactagatatgccgatagcgtcaagggccgtttcactataagcgcagacacatccaaaaacacagcctacctgcagatgaacagcctgcgtgctgaggacactgccgtctattattgttctaggtggggaggggacggcttctatgctatggactattggggtcaaggaaccctggtcactgtctcctccggtggtggtggttctggcggcggcggctccggtggtggtggttctgacatccagatgacccagtcccctagctccctgtccgcctctgtgggcgatagggtcaccatcacctgccgtgccagtcaggatgtgaatactgctgtagcctggtatcaacagaaaccaggaaaagctccgaaactactgatttactcggcatccttcctctactctggagtcccttctcgcttctctggatccagatctgggacggatttcactctgaccatcagcagtctgcagccggaagacttcgcaacttattactgtcagcaacattatactactcctcccacgttcggacagggtaccaaggtggagatcaaatccggaggtggtggatccgaggtgcagctggtcgagtctggaggaggattggtgcagcctggagggtcattgaaactctcatgtgcagcctctggattcaccttcaataagtacgccatgaactgggtccgccaggctccaggaaagggtttggaatgggttgctcgcataagaagtaaatataataattatgcaacatattatgccgattcagtgaaagacaggttcaccatctccagagatgattcaaaaaacactgcctatctacaaatgaacaacttgaaaactgaggacactgccgtgtactactgtgtgagacatgggaacttcggtaatagctacatatcctactgggcttactggggccaagggactctggtcaccgtctcctcaggtggtggtggttctggcggcggcggctccggtggtggtggttctcagactgttgtgactcaggaaccttcactcaccgtatcacctggtggaacagtcacactcacttgtggctcctcgactggggctgttacatctggcaactacccaaactgggtccaacaaaaaccaggtcaggcaccccgtggtctaataggtgggactaagttcctcgcccccggtactcctgccagattctcaggctccctgcttggaggcaaggctgccctcaccctctcaggggtacagccagaggatgaggcagaatattactgtgttctatggtacagcaaccgctgggtgttcggtggaggaaccaaactgactgtccta

SEQ ID NO: 475 - protein, 497 aa, Artificial Sequence
  H2C HL x Her2/neu LH
EVQLVESGGGLVQPGGSLKLSCAASGFTFNKYAMNWVRQAPGKGLEWVARIRSKYNNYATYYADSVKDRFTISRDDSKNTAYLQMNNLKTEDTAVYYCVRHGNFGNSYISYWAYWGQGTLVTVSSGGGGSGGGGSGGGGSQTVVTQEPSLTVSPGGTVTLTCGSSTGAVTSGYYPNWVQQKPGQAPRGLIGGTKFLAPGTPARFSGSLLGGKAALTLSGVQPEDEAEYYCALWYSNRWVFGGGTKLTVLSGGGGSDIQMTQSPSSLSASVGDRVTITCRASQDVNTAVAWYQQKPGKAPKLLIYSASFLYSGVPSRFSGSRSGTDFTLTISSLQPEDFATYYCQQHYTTPPTFGQGTKVEIKGGGGSGGGGSGGGGSEVQLVESGGGLVQPGGSLRLSCAASGFNIKDTYIHWVRQAPGKGLEWVARIYPTNGYTRYADSVKGRFTISADTSKNTAYLQMNSLRAEDTAVYYCSRWGGDGFYAMDYWGQGTLVTVSS

SEQ ID NO: 476 - DNA, 1491 bp, Artificial Sequence
  H2C HL x Her2/neu LH
gaggtgcagctggtcgagtctggaggaggattggtgcagcctggagggtcattgaaactctcatgtgcagcctctggattcaccttcaataagtacgccatgaactgggtccgccaggctccaggaaagggtttggaatgggttgctcgcataagaagtaaatataataattatgcaacatattatgccgattcagtgaaagacaggttcaccatctccagagatgattcaaaaaacactgcctatctacaaatgaacaacttgaaaactgaggacactgccgtgtactactgtgtgagacatgggaacttcggtaatagctacatatcctactgggcttactggggccaagggactctggtcaccgtctcctcaggtggtggtggttctggcggcggcggctccggtggtggtggttctcagactgttgtgactcaggaaccttcactcaccgtatcacctggtggaacagtcacactcacttgtggctcctcgactggggctgttacatctggctactacccaaactgggtccaacaaaaaccaggtcaggcaccccgtggtctaataggtgggactaagttcctcgcccccggtactcctgccagattctcaggctccctgcttggaggcaaggctgccctcaccctctcaggggtacagccagaggatgaggcagaatattactgtgctctatggtacagcaaccgctgggtgttcggtggaggaaccaaactgactgtcctatccggaggtggtggatccgacatccagatgacccagtcccctagctccctgtccgcctctgtgggcgatagggtcaccatcacctgccgtgccagtcaggatgtgaatactgctgtagcctggtatcaacagaaaccaggaaaagctccgaaactactgatttactcggcatccttcctctactctggagtcccttctcgcttctctggatccagatctgggacggatttcactctgaccatcagcagtctgcagccggaagacttcgcaacttattactgtcagcaacattatactactcctcccacgttcggacagggtaccaaggtggagatcaaaggtggtggtggttctggcggcggcggctccggtggtggtggttctgaggttcagctggtggagtctggcggtggcctggtgcagccagggggctcactccgtttgtcctgtgcagcttctggcttcaacattaaagacacctatatacactgggtgcgtcaggccccgggtaagggcctggaatgggttgcaaggatttatcctacgaatggttatactagatatgccgatagcgtcaagggccgtttcactataagcgcagacacatccaaaaacacagcctacctgcagatgaacagcctgcgtgctgaggacactgccgtctattattgttctaggtggggaggggacggcttctatgctatggactattggggtcaaggaaccctggtcactgtctcctcc

SEQ ID NO: 477 - protein, 497 aa, Artificial Sequence
  F12Q HL x Her2/neu LH
EVQLVESGGGLVQPGGSLKLSCAASGFTFNSYAMNWVRQAPGKGLEWVARIRSKYNNYATYYADSVKGRFTISRDDSKNTAYLQMNNLKTEDTAVYYCVRHGNFGNSYVSWWAYWGQGTLVTVSSGGGGSGGGGSGGGGSQTVVTQEPSLTVSPGGTVTLTCGSSTGAVTSGNYPNWVQQKPGQAPRGLIGGTKFLAPGTPARFSGSLLGGKAALTLSGVQPEDEAEYYCVLWYSNRWVFGGGTKLTVLSGGGGSDIQMTQSPSSLSASVGDRVTITCRASQDVNTAVAWYQQKPGKAPKLLIYSASFLYSGVPSRFSGSRSGTDFTLTISSLQPEDFATYYCQQHYTTPPTFGQGTKVEIKGGGGSGGGGSGGGGSEVQLVESGGGLVQPGGSLRLSCAASGFNIKDTYIHWVRQAPGKGLEWVARIYPTNGYTRYADSVKGRFTISADTSKNTAYLQMNSLRAEDTAVYYCSRWGGDGFYAMDYWGQGTLVTVSS

SEQ ID NO: 478 - DNA, 1491 bp, Artificial Sequence
  F12Q HL x Her2/neu LH
gaggtgcagctggtcgagtctggaggaggattggtgcagcctggagggtcattgaaactctcatgtgcagcctctggattcaccttcaatagctacgccatgaactgggtccgccaggctccaggaaagggtttggaatgggttgctcgcataagaagtaaatataataattatgcaacatattatgccgattcagtgaaaggcaggttcaccatctccagagatgattcaaaaaacactgcctatctacaaatgaacaacttgaaaactgaggacactgccgtgtactactgtgtgagacatgggaacttcggtaatagctacgtttcctggtgggcttactggggccaagggactctggtcaccgtctcctcaggtggtggtggttctggcggcggcggctccggtggtggtggttctcagactgttgtgactcaggaaccttcactcaccgtatcacctggtggaacagtcacactcacttgtggctcctcgactggggctgttacatctggcaactacccaaactgggtccaacaaaaaccaggtcaggcaccccgtggtctaataggtgggactaagttcctcgcccccggtactcctgccagattctcaggctccctgcttggaggcaaggctgccctcaccctctcaggggtacagccagaggatgaggcagaatattactgtgttctatggtacagcaaccgctgggtgttcggtggaggaaccaaactgactgtcctatccggaggtggtggatccgacatccagatgacccagtcccctagctccctgtccgcctctgtgggcgatagggtcaccatcacctgccgtgccagtcaggatgtgaatactgctgtagcctggtatcaacagaaaccaggaaaagctccgaaactactgatttactcggcatccttcctctactctggagtcccttctcgcttctctggatccagatctgggacggatttcactctgaccatcagcagtctgcagccggaagacttcgcaacttattactgtcagcaacattatactactcctcccacgttcggacagggtaccaaggtggagatcaaaggtggtggtggttctggcggcggcggctccggtggtggtggttctgaggttcagctggtggagtctggcggtggcctggtgcagccagggggctcactccgtttgtcctgtgcagcttctggcttcaacattaaagacacctatatacactgggtgcgtcaggccccgggtaagggcctggaatgggttgcaaggatttatcctacgaatggttatactagatatgccgatagcgtcaagggccgtttcactataagcgcagacacatccaaaaacacagcctacctgcagatgaacagcctgcgtgctgaggacactgccgtctattattgttctaggtggggaggggacggcttctatgctatggactattggggtcaaggaaccctggtcactgtctcctcc

SEQ ID NO: 479 - protein, 497 aa, Artificial Sequence
  I2C HL x Her2/neu LH
EVQLVESGGGLVQPGGSLKLSCAASGFTFNKYAMNWVRQAPGKGLEWVARIRSKYNNYATYYADSVKDRFTISRDDSKNTAYLQMNNLKTEDTAVYYCVRHGNFGNSYISYWAYWGQGTLVTVSSGGGGSGGGGSGGGGSQTVVTQEPSLTVSPGGTVTLTCGSSTGAVTSGNYPNWVQQKPGQAPRGLIGGTKFLAPGTPARFSGSLLGGKAALTLSGVQPEDEAEYYCVLWYSNRWVFGGGTKLTVLSGGGGSDIQMTQSPSSLSASVGDRVTITCRASQDVNTAVAWYQQKPGKAPKLLIYSASFLYSGVPSRFSGSRSGTDFTLTISSLQPEDFATYYCQQHYTTPPTFGQGTKVEIKGGGGSGGGGSGGGGSEVQLVESGGGLVQPGGSLRLSCAASGFNIKDTYIHWVRQAPGKGLEWVARIYPTNGYTRYADSVKGRFTISADTSKNTAYLQMNSLRAEDTAVYYCSRWGGDGFYAMDYWGQGTLVTVSS

SEQ ID NO: 480 - DNA, 1491 bp, Artificial Sequence
  I2C HL x Her2/neu LH
gaggtgcagctggtcgagtctggaggaggattggtgcagcctggagggtcattgaaactctcatgtgcagcctctggattcaccttcaataagtacgccatgaactgggtccgccaggctccaggaaagggtttggaatgggttgctcgcataagaagtaaatataataattatgcaacatattatgccgattcagtgaaagacaggttcaccatctccagagatgattcaaaaaacactgcctatctacaaatgaacaacttgaaaactgaggacactgccgtgtactactgtgtgagacatgggaacttcggtaatagctacatatcctactgggcttactggggccaagggactctggtcaccgtctcctcaggtggtggtggttctggcggcggcggctccggtggtggtggttctcagactgttgtgactcaggaaccttcactcaccgtatcacctggtggaacagtcacactcacttgtggctcctcgactggggctgttacatctggcaactacccaaactgggtccaacaaaaaccaggtcaggcaccccgtggtctaataggtgggactaagttcctcgcccccggtactcctgccagattctcaggctccctgcttggaggcaaggctgccctcaccctctcaggggtacagccagaggatgaggcagaatattactgtgttctatggtacagcaaccgctgggtgttcggtggaggaaccaaactgactgtcctatccggaggtggtggatccgacatccagatgacccagtcccctagctccctgtccgcctctgtgggcgatagggtcaccatcacctgccgtgccagtcaggatgtgaatactgctgtagcctggtatcaacagaaaccaggaaaagctccgaaactactgatttactcggcatccttcctctactctggagtcccttctcgcttctctggatccagatctgggacggatttcactctgaccatcagcagtctgcagccggaagacttcgcaacttattactgtcagcaacattatactactcctcccacgttcggacagggtaccaaggtggagatcaaaggtggtggtggttctggcggcggcggctccggtggtggtggttctgaggttcagctggtggagtctggcggtggcctggtgcagccagggggctcactccgtttgtcctgtgcagcttctggcttcaacattaaagacacctatatacactgggtgcgtcaggccccgggtaagggcctggaatgggttgcaaggatttatcctacgaatggttatactagatatgccgatagcgtcaagggccgtttcactataagcgcagacacatccaaaaacacagcctacctgcagatgaacagcctgcgtgctgaggacactgccgtctattattgttctaggtggggaggggacggcttctatgctatggactattggggtcaaggaaccctggtcactgtctcctcc

SEQ ID NO: 481 - protein, 6 aa, Artificial Sequence
  HCDR1 of IgE
SGYSWN

SEQ ID NO: 482 - protein, 16 aa, Artificial Sequence
  HCDR2 of IgE
SITYDGSTNYADSVKG

SEQ ID NO: 483 - protein, 12 aa, Artificial Sequence
  HCDR3 of IgE
GSHYFGHWHFAV

SEQ ID NO: 484 - protein, 15 aa, Artificial Sequence
  LCDR1 of IgE
RASQSVDYDGDSYMN

SEQ ID NO: 485 - protein, 7 aa, Artificial Sequence
  LCDR2 of IgE
AASYLES

SEQ ID NO: 486 - protein, 9 aa, Artificial Sequence
  LCDR3 of IgE
QQSHEDPYT

SEQ ID NO: 487 - protein, 121 aa, Artificial Sequence
  VH of IgE
EVQLVESGGGLVQPGGSLRLSCAVSGYSITSGYSWNWIRQAPGKGLEWVASITYDGSTNYADSVKGRFTISRDDSKNTFYLQMNSLRAEDTAVYYCARGSHYFGHWHFAVWGQGTLVTVSS

SEQ ID NO: 488 - DNA, 363 bp, Artificial Sequence
  VH of IgE
gaggtgcagctggtggagtctgggggaggcttggtccagcctggggggtccctgagactctcctgtgcagtctctggatactccatcaccagcggctacagttggaactggatccgccaggctccagggaaggggctggagtgggtcgcaagtattacgtacgacggtagcacaaactacgcagactccgtgaagggcagattcaccatctccagagacgactccaagaacacgttctatcttcaaatgaacagcctgagagccgaggacacggctgtgtattactgtgcgagaggttcccattatttcggccattggcacttcgccgtgtggggccagggaacgcttgtcacagttagctcc

SEQ ID NO: 489 - protein, 111 aa, Artificial Sequence [sequence omitted]

SEQ ID NO: 490 - DNA, 333 bp, Artificial Sequence
  VL of IgE
gacatccagctgacccagtctccatcctccctgtctgcatctgttggagacagagtcaccatcacttgccgggcaagtcagagcgttgactatgatggggacagctatatgaattggtatcagcagaaaccagggaaagcccctaagctcctgatctatgctgcatcctacttggaaagtggggtcccatcaaggttcagtggcagtggatctgggacagatttcactctcaccatcagcagtctgcaacctgaagattttgcaacttactactgtcaacagtctcatgaagatccatatacctttggacagggcactaaagtcgaaataaag

SEQ ID NO: 491 - protein, 247 aa, Artificial Sequence
  HL of IgE
EVQLVESGGGLVQPGGSLRLSCAVSGYSITSGYSWNWIRQAPGKGLEWVASITYDGSTNYADSVKGRFTISRDDSKNTFYLQMNSLRAEDTAVYYCARGSHYFGHWHFAVWGQGTLVTVSSGGGGSGGGGSGGGGSDIQLTQSPSSLSASVGDRVTITCRASQSVDYDGDSYMNWYQQKPGKAPKLLIYAASYLESGVPSRFSGSGSGTDFTLTISSLQPEDFATYYCQQSHEDPYTFGQGTKVEIK

SEQ ID NO: 492 - DNA, 741 bp, Artificial Sequence
  HL of IgE
gaggtgcagctggtggagtctgggggaggcttggtccagcctggggggtccctgagactctcctgtgcagtctctggatactccatcaccagcggctacagttggaactggatccgccaggctccagggaaggggctggagtgggtcgcaagtattacgtacgacggtagcacaaactacgcagactccgtgaagggcagattcaccatctccagagacgactccaagaacacgttctatcttcaaatgaacagcctgagagccgaggacacggctgtgtattactgtgcgagaggttcccattatttcggccattggcacttcgccgtgtggggccagggaacgcttgtcacagttagctccggtggtggtggttctggcggcggcggctccggtggtggtggttctgacatccagctgacccagtctccatcctccctgtctgcatctgttggagacagagtcaccatcacttgccgggcaagtcagagcgttgactatgatggggacagctatatgaattggtatcagcagaaaccagggaaagcccctaagctcctgatctatgctgcatcctacttggaaagtggggtcccatcaaggttcagtggcagtggatctgggacagatttcactctcaccatcagcagtctgcaacctgaagattttgcaacttactactgtcaacagtctcatgaagatccatatacctttggacagggcactaaagtcgaaataaag

SEQ ID NO: 493 - protein, 247 aa, Artificial Sequence
  LH of IgE
DIQLTQSPSSLSASVGDRVTITCRASQSVDYDGDSYMNWYQQKPGKAPKLLIYAASYLESGVPSRFSGSGSGTDFTLTISSLQPEDFATYYCQQSHEDPYTFGQGTKVEIKGGGGSGGGGSGGGGSEVQLVESGGGLVQPGGSLRLSCAVSGYSITSGYSWNWIRQAPGKGLEWVASITYDGSTNYADSVKGRFTISRDDSKNTFYLQMNSLRAEDTAVYYCARGSHYFGHWHFAVWGQGTLVTVSS

SEQ ID NO: 494 - DNA, 741 bp, Artificial Sequence
  LH of IgE
gacatccagctgacccagtctccatcctccctgtctgcatctgttggagacagagtcaccatcacttgccgggcaagtcagagcgttgactatgatggggacagctatatgaattggtatcagcagaaaccagggaaagcccctaagctcctgatctatgctgcatcctacttggaaagtggggtcccatcaaggttcagtggcagtggatctgggacagatttcactctcaccatcagcagtctgcaacctgaagattttgcaacttactactgtcaacagtctcatgaagatccatatacctttggacagggcactaaagtcgaaataaagggtggtggtggttctggcggcggcggctccggtggtggtggttctgaggtgcagctggtggagtctgggggaggcttggtccagcctggggggtccctgagactctcctgtgcagtctctggatactccatcaccagcggctacagttggaactggatccgccaggctccagggaaggggctggagtgggtcgcaagtattacgtacgacggtagcacaaactacgcagactccgtgaagggcagattcaccatctccagagacgactccaagaacacgttctatcttcaaatgaacagcctgagagccgaggacacggctgtgtattactgtgcgagaggttcccattatttcggccattggcacttcgccgtgtggggccagggaacgcttgtcacagttagctcc

SEQ ID NO: 495 - protein, 502 aa, Artificial Sequence
  IgE HL x H2C HL
EVQLVESGGGLVQPGGSLRLSCAVSGYSITSGYSWNWIRQAPGKGLEWVASITYDGSTNYADSVKGRFTISRDDSKNTFYLQMNSLRAEDTAVYYCARGSHYFGHWHFAVWGQGTLVTVSSGGGGSGGGGSGGGGSDIQLTQSPSSLSASVGDRVTITCRASQSVDYDGDSYMNWYQQKPGKAPKLLIYAASYLESGVPSRFSGSGSGTDFTLTISSLQPEDFATYYCQQSHEDPYTFGQGTKVEIKSGGGGSEVQLVESGGGLVQPGGSLKLSCAASGFTFNKYAMNWVRQAPGKGLEWVARIRSKYNNYATYYADSVKDRFTISRDDSKNTAYLQMNNLKTEDTAVYYCVRHGNFGNSYISYWAYWGQGTLVTVSSGGGGSGGGGSGGGGSQTVVTQEPSLTVSPGGTVTLTCGSSTGAVTSGYYPNWVQQKPGQAPRGLIGGTKFLAPGTPARFSGSLLGGKAALTLSGVQPEDEAEYYCALWYSNRWVFGGGTKLTVL

SEQ ID NO: 496 - DNA, 1506 bp, Artificial Sequence
  IgE HL x H2C HL
gaggtgcagctggtggagtctgggggaggcttggtccagcctggggggtccctgagactctcctgtgcagtctctggatactccatcaccagcggctacagttggaactggatccgccaggctccagggaaggggctggagtgggtcgcaagtattacgtacgacggtagcacaaactacgcagactccgtgaagggcagattcaccatctccagagacgactccaagaacacgttctatcttcaaatgaacagcctgagagccgaggacacggctgtgtattactgtgcgagaggttcccattatttcggccattggcacttcgccgtgtggggccagggaacgcttgtcacagttagctccggtggtggtggttctggcggcggcggctccggtggtggtggttctgacatccagctgacccagtctccatcctccctgtctgcatctgttggagacagagtcaccatcacttgccgggcaagtcagagcgttgactatgatggggacagctatatgaattggtatcagcagaaaccagggaaagcccctaagctcctgatctatgctgcatcctacttggaaagtggggtcccatcaaggttcagtggcagtggatctgggacagatttcactctcaccatcagcagtctgcaacctgaagattttgcaacttactactgtcaacagtctcatgaagatccatatacctttggacagggcactaaagtcgaaataaagtccggaggtggtggatccgaggtgcagctggtcgagtctggaggaggattggtgcagcctggagggtcattgaaactctcatgtgcagcctctggattcaccttcaataagtacgccatgaactgggtccgccaggctccaggaaagggtttggaatgggttgctcgcataagaagtaaatataataattatgcaacatattatgccgattcagtgaaagacaggttcaccatctccagagatgattcaaaaaacactgcctatctacaaatgaacaacttgaaaactgaggacactgccgtgtactactgtgtgagacatgggaacttcggtaatagctacatatcctactgggcttactggggccaagggactctggtcaccgtctcctcaggtggtggtggttctggcggcggcggctccggtggtggtggttctcagactgttgtgactcaggaaccttcactcaccgtatcacctggtggaacagtcacactcacttgtggctcctcgactggggctgttacatctggctactacccaaactgggtccaacaaaaaccaggtcaggcaccccgtggtctaataggtgggactaagttcctcgcccccggtactcctgccagattctcaggctccctgcttggaggcaaggctgccctcaccctctcaggggtacagccagaggatgaggcagaatattactgtgctctatggtacagcaaccgctgggtgttcggtggaggaaccaaactgactgtccta

SEQ ID NO: 497 - protein, 502 aa, Artificial Sequence
  IgE HL x F12Q HL
EVQLVESGGGLVQPGGSLRLSCAVSGYSITSGYSWNWIRQAPGKGLEWVASITYDGSTNYADSVKGRFTISRDDSKNTFYLQMNSLRAEDTAVYYCARGSHYFGHWHFAVWGQGTLVTVSSGGGGSGGGGSGGGGSDIQLTQSPSSLSASVGDRVTITCRASQSVDYDGDSYMNWYQQKPGKAPKLLIYAASYLESGVPSRFSGSGSGTDFTLTISSLQPEDFATYYCQQSHEDPYTFGQGTKVEIKSGGGGSEVQLVESGGGLVQPGGSLKLSCAASGFTFNSYAMNWVRQAPGKGLEWVARIRSKYNNYATYYADSVKGRFTISRDDSKNTAYLQMNNLKTEDTAVYYCVRHGNFGNSYVSWWAYWGQGTLVTVSSGGGGSGGGGSGGGGSQTVVTQEPSLTVSPGGTVTLTCGSSTGAVTSGNYPNWVQQKPGQAPRGLIGGTKFLAPGTPARFSGSLLGGKAALTLSGVQPEDEAEYYCVLWYSNRWVFGGGTKLTVL

SEQ ID NO: 498 - DNA, 1506 bp, Artificial Sequence
  IgE HL x F12Q HL
gaggtgcagctggtggagtctgggggaggcttggtccagcctggggggtccctgagactctcctgtgcagtctctggatactccatcaccagcggctacagttggaactggatccgccaggctccagggaaggggctggagtgggtcgcaagtattacgtacgacggtagcacaaactacgcagactccgtgaagggcagattcaccatctccagagacgactccaagaacacgttctatcttcaaatgaacagcctgagagccgaggacacggctgtgtattactgtgcgagaggttcccattatttcggccattggcacttcgccgtgtggggccagggaacgcttgtcacagttagctccggtggtggtggttctggcggcggcggctccggtggtggtggttctgacatccagctgacccagtctccatcctccctgtctgcatctgttggagacagagtcaccatcacttgccgggcaagtcagagcgttgactatgatggggacagctatatgaattggtatcagcagaaaccagggaaagcccctaagctcctgatctatgctgcatcctacttggaaagtggggtcccatcaaggttcagtggcagtggatctgggacagatttcactctcaccatcagcagtctgcaacctgaagattttgcaacttactactgtcaacagtctcatgaagatccatatacctttggacagggcactaaagtcgaaataaagtccggaggtggtggatccgaggtgcagctggtcgagtctggaggaggattggtgcagcctggagggtcattgaaactctcatgtgcagcctctggattcaccttcaatagctacgccatgaactgggtccgccaggctccaggaaagggtttggaatgggttgctcgcataagaagtaaatataataattatgcaacatattatgccgattcagtgaaaggcaggttcaccatctccagagatgattcaaaaaacactgcctatctacaaatgaacaacttgaaaactgaggacactgccgtgtactactgtgtgagacatgggaacttcggtaatagctacgtttcctggtgggcttactggggccaagggactctggtcaccgtctcctcaggtggtggtggttctggcggcggcggctccggtggtggtggttctcagactgttgtgactcaggaaccttcactcaccgtatcacctggtggaacagtcacactcacttgtggctcctcgactggggctgttacatctggcaactacccaaactgggtccaacaaaaaccaggtcaggcaccccgtggtctaataggtgggactaagttcctcgcccccggtactcctgccagattctcaggctccctgcttggaggcaaggctgccctcaccctctcaggggtacagccagaggatgaggcagaatattactgtgttctatggtacagcaaccgctgggtgttcggtggaggaaccaaactgactgtccta

SEQ ID NO: 499 - protein, 502 aa, Artificial Sequence
  IgE HL x I2C HL
EVQLVESGGGLVQPGGSLRLSCAVSGYSITSGYSWNWIRQAPGKGLEWVASITYDGSTNYADSVKGRFTISRDDSKNTFYLQMNSLRAEDTAVYYCARGSHYFGHWHFAVWGQGTLVTVSSGGGGSGGGGSGGGGSDIQLTQSPSSLSASVGDRVTITCRASQSVDYDGDSYMNWYQQKPGKAPKLLIYAASYLESGVPSRFSGSGSGTDFTLTISSLQPEDFATYYCQQSHEDPYTFGQGTKVEIKSGGGGSEVQLVESGGGLVQPGGSLKLSCAASGFTFNKYAMNWVRQAPGKGLEWVARIRSKYNNYATYYADSVKDRFTISRDDSKNTAYLQMNNLKTEDTAVYYCVRHGNFGNSYISYWAYWGQGTLVTVSSGGGGSGGGGSGGGGSQTVVTQEPSLTVSPGGTVTLTCGSSTGAVTSGNYPNWVQQKPGQAPRGLIGGTKFLAPGTPARFSGSLLGGKAALTLSGVQPEDEAEYYCVLWYSNRWVFGGGTKLTVL

SEQ ID NO: 500 - DNA, 1506 bp, Artificial Sequence
  IgE HL x I2C HL
gaggtgcagctggtggagtctgggggaggcttggtccagcctggggggtccctgagactctcctgtgcagtctctggatactccatcaccagcggctacagttggaactggatccgccaggctccagggaaggggctggagtgggtcgcaagtattacgtacgacggtagcacaaactacgcagactccgtgaagggcagattcaccatctccagagacgactccaagaacacgttctatcttcaaatgaacagcctgagagccgaggacacggctgtgtattactgtgcgagaggttcccattatttcggccattggcacttcgccgtgtggggccagggaacgcttgtcacagttagctccggtggtggtggttctggcggcggcggctccggtggtggtggttctgacatccagctgacccagtctccatcctccctgtctgcatctgttggagacagagtcaccatcacttgccgggcaagtcagagcgttgactatgatggggacagctatatgaattggtatcagcagaaaccagggaaagcccctaagctcctgatctatgctgcatcctacttggaaagtggggtcccatcaaggttcagtggcagtggatctgggacagatttcactctcaccatcagcagtctgcaacctgaagattttgcaacttactactgtcaacagtctcatgaagatccatatacctttggacagggcactaaagtcgaaataaagtccggaggtggtggatccgaggtgcagctggtcgagtctggaggaggattggtgcagcctggagggtcattgaaactctcatgtgcagcctctggattcaccttcaataagtacgccatgaactgggtccgccaggctccaggaaagggtttggaatgggttgctcgcataagaagtaaatataataattatgcaacatattatgccgattcagtgaaagacaggttcaccatctccagagatgattcaaaaaacactgcctatctacaaatgaacaacttgaaaactgaggacactgccgtgtactactgtgtgagacatgggaacttcggtaatagctacatatcctactgggcttactggggccaagggactctggtcaccgtctcctcaggtggtggtggttctggcggcggcggctccggtggtggtggttctcagactgttgtgactcaggaaccttcactcaccgtatcacctggtggaacagtcacactcacttgtggctcctcgactggggctgttacatctggcaactacccaaactgggtccaacaaaaaccaggtcaggcaccccgtggtctaataggtgggactaagttcctcgcccccggtactcctgccagattctcaggctccctgcttggaggcaaggctgccctcaccctctcaggggtacagccagaggatgaggcagaatattactgtgttctatggtacagcaaccgctgggtgttcggtggaggaaccaaactgactgtccta

SEQ ID NO: 501 - protein, 501 aa, Artificial Sequence
  IgE LH x H2C HL
DIQLTQSPSSLSASVGDRVTITCRASQSVDYDGDSYMNWYQQKPGKAPKLLIYAASYLESGVPSRFSGSGSGTDFTLTISSLQPEDFATYYCQQSHEDPYTFGQGTKVEIKGGGGSGGGGSGGGGSEVQLVESGGGLVQPGGSLRLSCAVSGYSITSGYSWNWIRQAPGKGLEWVASITYDGSTNYADSVKGRFTISRDDSKNTFYLQMNSLRAEDTAVYYCARGSHYFGHWHFAVWGQGTLVTVSSGGGGSEVQLVESGGGLVQPGGSLKLSCAASGFTFNKYAMNWVRQAPGKGLEWVARIRSKYNNYATYYADSVKDRFTISRDDSKNTAYLQMNNLKTEDTAVYYCVRHGNFGNSYISYWAYWGQGTLVTVSSGGGGSGGGGSGGGGSQTVVTQEPSLTVSPGGTVTLTCGSSTGAVTSGYYPNWVQQKPGQAPRGLIGGTKFLAPGTPARFSGSLLGGKAALTLSGVQPEDEAEYYCALWYSNRWVFGGGTKLTVL

SEQ ID NO: 502 - DNA, 1503 bp, Artificial Sequence
  IgE LH x H2C HL
gacatccagctgacccagtctccatcctccctgtctgcatctgttggagacagagtcaccatcacttgccgggcaagtcagagcgttgactatgatggggacagctatatgaattggtatcagcagaaaccagggaaagcccctaagctcctgatctatgctgcatcctacttggaaagtggggtcccatcaaggttcagtggcagtggatctgggacagatttcactctcaccatcagcagtctgcaacctgaagattttgcaacttactactgtcaacagtctcatgaagatccatatacctttggacagggcactaaagtcgaaataaagggtggtggtggttctggcggcggcggctccggtggtggtggttctgaggtgcagctggtggagtctgggggaggcttggtccagcctggggggtccctgagactctcctgtgcagtctctggatactccatcaccagcggctacagttggaactggatccgccaggctccagggaaggggctggagtgggtcgcaagtattacgtacgacggtagcacaaactacgcagactccgtgaagggcagattcaccatctccagagacgactccaagaacacgttctatcttcaaatgaacagcctgagagccgaggacacggctgtgtattactgtgcgagaggttcccattatttcggccattggcacttcgccgtgtggggccagggaacgcttgtcacagttagctccggaggtggtggatccgaggtgcagctggtcgagtctggaggaggattggtgcagcctggagggtcattgaaactctcatgtgcagcctctggattcaccttcaataagtacgccatgaactgggtccgccaggctccaggaaagggtttggaatgggttgctcgcataagaagtaaatataataattatgcaacatattatgccgattcagtgaaagacaggttcaccatctccagagatgattcaaaaaacactgcctatctacaaatgaacaacttgaaaactgaggacactgccgtgtactactgtgtgagacatgggaacttcggtaatagctacatatcctactgggcttactggggccaagggactctggtcaccgtctcctcaggtggtggtggttctggcggcggcggctccggtggtggtggttctcagactgttgtgactcaggaaccttcactcaccgtatcacctggtggaacagtcacactcacttgtggctcctcgactggggctgttacatctggctactacccaaactgggtccaacaaaaaccaggtcaggcaccccgtggtctaataggtgggactaagttcctcgcccccggtactcctgccagattctcaggctccctgcttggaggcaaggctgccctcaccctctcaggggtacagccagaggatgaggcagaatattactgtgctctatggtacagcaaccgctgggtgttcggtggaggaaccaaactgactgtccta

SEQ ID NO: 503 - protein, 501 aa, Artificial Sequence
  IgE LH x F12Q HL
DIQLTQSPSSLSASVGDRVTITCRASQSVDYDGDSYMNWYQQKPGKAPKLLIYAASYLESGVPSRFSGSGSGTDFTLTISSLQPEDFATYYCQQSHEDPYTFGQGTKVEIKGGGGSGGGGSGGGGSEVQLVESGGGLVQPGGSLRLSCAVSGYSITSGYSWNWIRQAPGKGLEWVASITYDGSTNYADSVKGRFTISRDDSKNTFYLQMNSLRAEDTAVYYCARGSHYFGHWHFAVWGQGTLVTVSSGGGGSEVQLVESGGGLVQPGGSLKLSCAASGFTFNSYAMNWVRQAPGKGLEWVARIRSKYNNYATYYADSVKGRFTISRDDSKNTAYLQMNNLKTEDTAVYYCVRHGNFGNSYVSWWAYWGQGTLVTVSSGGGGSGGGGSGGGGSQTVVTQEPSLTVSPGGTVTLTCGSSTGAVTSGNYPNWVQQKPGQAPRGLIGGTKFLAPGTPARFSGSLLGGKAALTLSGVQPEDEAEYYCVLWYSNRWVFGGGTKLTVL

SEQ ID NO: 504 - DNA, 1503 bp, Artificial Sequence
  IgE LH x F12Q HL
gacatccagctgacccagtctccatcctccctgtctgcatctgttggagacagagtcaccatcacttgccgggcaagtcagagcgttgactatgatggggacagctatatgaattggtatcagcagaaaccagggaaagcccctaagctcctgatctatgctgcatcctacttggaaagtggggtcccatcaaggttcagtggcagtggatctgggacagatttcactctcaccatcagcagtctgcaacctgaagattttgcaacttactactgtcaacagtctcatgaagatccatatacctttggacagggcactaaagtcgaaataaagggtggtggtggttctggcggcggcggctccggtggtggtggttctgaggtgcagctggtggagtctgggggaggcttggtccagcctggggggtccctgagactctcctgtgcagtctctggatactccatcaccagcggctacagttggaactggatccgccaggctccagggaaggggctggagtgggtcgcaagtattacgtacgacggtagcacaaactacgcagactccgtgaagggcagattcaccatctccagagacgactccaagaacacgttctatcttcaaatgaacagcctgagagccgaggacacggctgtgtattactgtgcgagaggttcccattatttcggccattggcacttcgccgtgtggggccagggaacgcttgtcacagttagctccggaggtggtggatccgaggtgcagctggtcgagtctggaggaggattggtgcagcctggagggtcattgaaactctcatgtgcagcctctggattcaccttcaatagctacgccatgaactgggtccgccaggctccaggaaagggtttggaatgggttgctcgcataagaagtaaatataataattatgcaacatattatgccgattcagtgaaaggcaggttcaccatctccagagatgattcaaaaaacactgcctatctacaaatgaacaacttgaaaactgaggacactgccgtgtactactgtgtgagacatgggaacttcggtaatagctacgtttcctggtgggcttactggggccaagggactctggtcaccgtctcctcaggtggtggtggttctggcggcggcggctccggtggtggtggttctcagactgttgtgactcaggaaccttcactcaccgtatcacctggtggaacagtcacactcacttgtggctcctcgactggggctgttacatctggcaactacccaaactgggtccaacaaaaaccaggtcaggcaccccgtggtctaataggtgggactaagttcctcgcccccggtactcctgccagattctcaggctccctgcttggaggcaaggctgccctcaccctctcaggggtacagccagaggatgaggcagaatattactgtgttctatggtacagcaaccgctgggtgttcggtggaggaaccaaactgactgtccta

SEQ ID NO: 505 - protein, 501 aa, Artificial Sequence
  IgE LH x I2C HL
DIQLTQSPSSLSASVGDRVTITCRASQSVDYDGDSYMNWYQQKPGKAPKLLIYAASYLESGVPSRFSGSGSGTDFTLTISSLQPEDFATYYCQQSHEDPYTFGQGTKVEIKGGGGSGGGGSGGGGSEVQLVESGGGLVQPGGSLRLSCAVSGYSITSGYSWNWIRQAPGKGLEWVASITYDGSTNYADSVKGRFTISRDDSKNTFYLQMNSLRAEDTAVYYCARGSHYFGHWHFAVWGQGTLVTVSSGGGGSEVQLVESGGGLVQPGGSLKLSCAASGFTFNKYAMNWVRQAPGKGLEWVARIRSKYNNYATYYADSVKDRFTISRDDSKNTAYLQMNNLKTEDTAVYYCVRHGNFGNSYISYWAYWGQGTLVTVSSGGGGSGGGGSGGGGSQTVVTQEPSLTVSPGGTVTLTCGSSTGAVTSGNYPNWVQQKPGQAPRGLIGGTKFLAPGTPARFSGSLLGGKAALTLSGVQPEDEAEYYCVLWYSNRWVFGGGTKLTVL

SEQ ID NO: 506 - DNA, 1503 bp, Artificial Sequence
  IgE LH x I2C HL
gacatccagctgacccagtctccatcctccctgtctgcatctgttggagacagagtcaccatcacttgccgggcaagtcagagcgttgactatgatggggacagctatatgaattggtatcagcagaaaccagggaaagcccctaagctcctgatctatgctgcatcctacttggaaagtggggtcccatcaaggttcagtggcagtggatctgggacagatttcactctcaccatcagcagtctgcaacctgaagattttgcaacttactactgtcaacagtctcatgaagatccatatacctttggacagggcactaaagtcgaaataaagggtggtggtggttctggcggcggcggctccggtggtggtggttctgaggtgcagctggtggagtctgggggaggcttggtccagcctggggggtccctgagactctcctgtgcagtctctggatactccatcaccagcggctacagttggaactggatccgccaggctccagggaaggggctggagtgggtcgcaagtattacgtacgacggtagcacaaactacgcagactccgtgaagggcagattcaccatctccagagacgactccaagaacacgttctatcttcaaatgaacagcctgagagccgaggacacggctgtgtattactgtgcgagaggttcccattatttcggccattggcacttcgccgtgtggggccagggaacgcttgtcacagttagctccggaggtggtggatccgaggtgcagctggtcgagtctggaggaggattggtgcagcctggagggtcattgaaactctcatgtgcagcctctggattcaccttcaataagtacgccatgaactgggtccgccaggctccaggaaagggtttggaatgggttgctcgcataagaagtaaatataataattatgcaacatattatgccgattcagtgaaagacaggttcaccatctccagagatgattcaaaaaacactgcctatctacaaatgaacaacttgaaaactgaggacactgccgtgtactactgtgtgagacatgggaacttcggtaatagctacatatcctactgggcttactggggccaagggactctggtcaccgtctcctcaggtggtggtggttctggcggcggcggctccggtggtggtggttctcagactgttgtgactcaggaaccttcactcaccgtatcacctggtggaacagtcacactcacttgtggctcctcgactggggctgttacatctggcaactacccaaactgggtccaacaaaaaccaggtcaggcaccccgtggtctaataggtgggactaagttcctcgcccccggtactcctgccagattctcaggctccctgcttggaggcaaggctgccctcaccctctcaggggtacagccagaggatgaggcagaatattactgtgttctatggtacagcaaccgctgggtgttcggtggaggaaccaaactgactgtccta

SEQ ID NO: 507 - DNA, 2261 bp, Macaca mulatta
gaattccaccatgggatggagctgtatcatcctcttcttggtagcaacagctacaggtaaggggctcacagtagcaggcttgaggtctggacatatatatgggtgacaatgacatccactttgcctttctctccttagggtgtacactcccaggtccaactgcaccagcctggggctgagcttgtgaagcctggggcttcagtgaagctgtcctgcaaggcttctggctacaccttcaccagctactggatgcactgggtgaagcagaggcctggacgaggccttgagtggattggaaggattgatcctaatagtggtggtactaagtacaatgagaagttcaagagcaaggccacactgactgtagacaaaccctccagcacagcctacatgcagctcagcagcctgacatctgaggactctgcggtctattattgtgcaagatacgattactacggtagtagctactttgactactggggccaaggcaccactctcacagtctcctcaggtgagtccttacaacctctctcttctattcagcttaaatagattttactgcatttgttgggggggaaatgtgtgtatctgaatttcaggtcatgaaggactagggacaccttgggagtcagaaagggtcattgggagccctggctgatgcagacagacatcctcagctcccagacttcatggccagagatttatagggatccactagttctagatgtcccacaccgcggtcacatggcaccacctctcttgcagcctccatacagagcccattcgtcttccccttgatcccctgctgcaaacacattgcctccaatgccacctccgtgactctgggctgcctggccacgggctacttcccggagccggtgatggtcacttgggacgcaggctccctcaaccggtcaactatgaccttaccagccaccaccttcacgccctctggtcactatgccaccatcagcttgctgaccgtctcgggtgcgtgggccaaggagactttcacctgccatgtggtacacactccatcgtccgcagacaaggaggttaacaaaaccttcggcgtctgctccaggaacttcaccccgcccaccgtgaagatcttacagtcgtcctgcgacgatgacgggcacttccccccgaccatccagctcctgtgcctcatctctgggtacaccccaggggctatcaacgtcacctggctggagaacgggcaggtcatgaaagtgaactcgcccaccccccctgcaacgcaggagggtgagctggcctccacacaaagcgagtttaccctcgctcagaagcagtggctgacagaccgcaactacacctgccaagtcacctatcaaggtaccacctataacgacagcaccaagaagtgtgcagattccaacccgagaggggtgagcgcctacctaagccggcccagcccgttcgacctgttcatcagcaagtcgcccacgatcacctgtctggtggtggacctggcacccagcaaggagaccgtgaacctgacctggtcccgggccagtgggaagcctgtgccccacatccccacaacggagaagaagcagcgcaatggcacgttaaccgtcacgtccatcctgccggtagtcacccaagactggatcgagggggagacctaccagtgcagagtcacccacccccacctgcccagggccctcgtgcggtccatgaccaagaccagcggcccgcgtgctgccccggaagtctatgtgtttgcgacgccggagaagctggagagccgggacaagcgcaccctcgcctgcctgatccagaacttcatgcctgaagacatctcggtgcagtggctgcacagcgatgtgcagctcccggacgcccggcacagcgtgacgcagccccgcaagaccaagggctccggcttcttcgtcttcagccgcctggaagtgaccaaggccgaatgggagcagaaagatgagttcatctgccgtgcagtccatgaggcagcgagcccctcatggatcgtccagcaagcggtgtctgtaaatcccgagctggacgtgtgcgtggaggaggccgagggcgaggcgccgtggacgtggaccggcctctgcatcttcgccgcactcttcctgctcagcgtgagctacagcgccgccctcacgctcctcatggtgcagcggttcctctcagccacgcggcaggggaggccccagacctccctcgactacaccaacgtcctccagccccacgcctagtctagagtcgac

SEQ ID NO: 508 - DNA, 2677 bp, Homo sapiens
gaattccaccatgggatggagctgtatcatcctcttcttggtagcaacagctacaggtaaggggctcacagtagcaggcttgaggtctggacatatatatgggtgacaatgacatccactttgcctttctctccttagggtgtacactcccaggtccaactgcaccagcctggggctgagcttgtgaagcctggggcttcagtgaagctgtcctgcaaggcttctggctacaccttcaccagctactggatgcactgggtgaagcagaggcctggacgaggccttgagtggattggaaggattgatcctaatagtggtggtactaagtacaatgagaagttcaagagcaaggccacactgactgtagacaaaccctccagcacagcctacatgcagctcagcagcctgacatctgaggactctgcggtctattattgtgcaagatacgattactacggtagtagctactttgactactggggccaaggcaccactctcacagtctcctcaggtgagtccttacaacctctctcttctattcagcttaaatagattttactgcatttgttgggggggaaatgtgtgtatctgaatttcaggtcatgaaggactagggacaccttgggagtcagaaagggtcattgggagccctggctgatgcagacagacatcctcagctcccagacttcatggccagagatttataggggatccctgccacggggtccccagctcccccatccaggccccccaggctgatgggcgctggcctgaggctggcactgactaggttctgtcctcacagcctccacacagagcccatccgtcttccccttgacccgctgctgcaaaaacattccctccaatgccacctccgtgactctgggctgcctggccacgggctacttcccggagccggtgatggtgacctgggacacaggctccctcaacgggacaactatgaccttaccagccaccaccctcacgctctctggtcactatgccaccatcagcttgctgaccgtctcgggtgcgtgggccaagcagatgttcacctgccgtgtggcacacactccatcgtccacagactgggtcgacaacaaaaccttcagcggtaagagagggccaagctcagagaccacagttcccaggagtgccaggctgagggctggcagagtgggcaggggttgagggggtgggtgggctcaaacgtgggaacacccagcatgcctggggacccgggccaggacgtgggggcaagaggagggcacacagagctcagagaggccaacaaccctcatgaccaccagctctcccccagtctgctccagggacttcaccccgcccaccgtgaagatcttacagtcgtcctgcgacggcggcgggcacttccccccgaccatccagctcctgtgcctcgtctctgggtacaccccagggactatcaacatcacctggctggaggacgggcaggtcatggacgtggacttgtccaccgcctctaccacgcaggagggtgagctggcctccacacaaagcgagctcaccctcagccagaagcactggctgtcagaccgcacctacacctgccaggtcacctatcaaggtcacacctttgaggacagcaccaagaagtgtgcaggtacgttcccacctgccctggtggccgccacggaggccagagaagaggggcgggtgggcctcacacagccctccggtgtaccacagattccaacccgagaggggtgagcgcctacctaagccggcccagcccgttcgacctgttcatccgcaagtcgcccacgatcacctgtctggtggtggacctggcacccagcaaggggaccgtgaacctgacctggtcccgggccagtgggaagcctgtgaaccactccaccagaaaggaggagaagcagcgcaatggcacgttaaccgtcacgtccaccctgccggtgggcacccgagactggatcgagggggagacctaccagtgcagggtgacccacccccacctgcccagggccctcatgcggtccacgaccaagaccagcggtgagccatgggcaggccggggtcgtgggggaagggagggagcgagtgagcggggcccgggctgaccccacgtctggccacaggcccgcgtgctgccccggaagtctatgcgtttgcgacgccggagtggccggggagccgggacaagcgcaccctcgcctgcctgatccagaacttcatgcctgaggacatctcggtgcagtggctgcacaacgaggtgcagctcccggacgcccggcacagcacgacgcagccccgcaagaccaagggctccggcttcttcgtcttcagccgcctggaggtgaccagggccgaatgggagcagaaagatgagttcatctgccgtgcagtccatgaggcagcgagcccctcacagaccgtccagcgagcggtgtctgtaaatcccgagctggacgtgtgcgtggaggaggccgagggcgaggcgccgtggacgtggaccggcctctgcatcttcgccgcactcttcctgctcagcgtgagctacagcgccgccctcacgctcctcatggtgcagcggttcctctcagccacgcggcaggggaggccccagacctccctcgactacaccaacgtcctccagccccacgcctagtctagagtcgac
